(19) United States
(12) Patent Application Publication
(10) Pub. No.: US 2006/0053498 A1
(43) Pub. Date: Mar. 9, 2006

(54) Full-length human cdnas encoding potentially secreted proteins

(76) Inventors: Stephane Bejanin, Rochechouart (FR); Jean-Baptiste Dumas Milne Edwards, Paris (FR); Jean-Yves Giordano, Paris (FR); Severin Jobert, Paris (FR); Hiroaki Tanaka, Antony (FR)

Correspondence Address: SALIWANCHIK LLOYD & SALIWANCHIK;A PROFESSIONAL ASSOCIATION, PO BOX 142950, GAINESVILLE, FL, 32614-2950, US

(21) Appl. No.: 10/475,075

(22) PCT Filed: Apr. 18, 2001
(86) PCT No.: PCT/IB01/00914

§ 371 Date: Jul. 12, 2005

(51) Int. Cl. A01K 67/00; C07K 14/47; C12Q 1/68; C07H 21/04; C12P 21/06

(52) U.S. Cl. 800/8; 435/6; 435/69.1; 435/320.1; 435/325; 530/350; 536/23.5

(57) ABSTRACT

The invention concerns GENSET polynucleotides and polypeptides. Such GENSET products may be used as reagents in forensic analyses, as chromosome markers, as tissue/cell/organelle-specific markers, in the production of expression vectors. In addition, they may be used in screening and diagnosis assays for abnormal GENSET expression and/or biological activity and for screening compounds that may be used in the treatment of GENSET-related disorders.

### CROSS REFERENCE TO RELATED APPLICATIONS

[0001] The present application is related to and claims priority from U.S. provisional Application Nos. 60/197,873, filed Apr. 18, 2000, 60/224,009, filed Aug. 7, 2000, 60/260,328, filed Jan. 8, 2001, and 60/224,006, filed Aug. 4, 2000, the entire disclosures of each of which is herein incorporated by reference.

### FIELD OF THE INVENTION

[0002] The present invention is directed to GENSET polypeptides, fragments thereof, and the regulatory regions located in the 5′- and 3′-ends of the genes encoding the polypeptides. The invention also concerns polypeptides encoded by GENSET genes and fragments thereof. The present invention also relates to recombinant vectors including the polynucleotides of the present invention, particularly recombinant vectors comprising a GENSET gene regulatory region or a sequence encoding a GENSET polypeptide, and to host cells containing the polynucleotides of the invention, as well as to methods of making such vectors and host cells. The present invention further relates to the use of these recombinant vectors and host cells in the production of the polypeptides of the invention. The invention further relates to antibodies that specifically bind to the polypeptides of the invention and to methods for producing such antibodies and fragments thereof. The invention also provides methods of detecting the presence of the polynucleotides and polypeptides of the present invention in a sample, methods of diagnosis and screening of abnormal GENSET polypeptide expression and/or biological activity, methods of screening compounds for their ability to modulate the activity or expression of the GENSET polypeptides, and uses of such compounds.

### BACKGROUND OF THE INVENTION

[0003] The estimated 30,000-12,000 genes scattered along the human chromosomes offer tremendous promise for the understanding, diagnosis, and treatment of human diseases. In addition, probes capable of specifically hybridizing to loci distributed throughout the human genome find application in the construction of high resolution chromosome maps and in the identification of individuals.

[0004] In the past, the characterization of even a single human gene was a painstaking process, requiring years of effort. Recent developments in the areas of cloning vectors, DNA sequencing, and computer technology have merged to greatly accelerate the rate at which human genes can be isolated, sequenced, mapped, and characterized.

[0005] Currently, two different approaches are being pursued for identifying and characterizing the genes distributed along the human genome. In one approach, large fragments of genomic DNA are isolated, cloned, and sequenced. Potential open reading frames in these genomic sequences are identified using bio-informatics software. However, this approach entails sequencing large stretches of human DNA which do not encode proteins in order to find the protein encoding sequences scattered throughout the genome. In addition to requiring extensive sequencing, the bio-informatics software may mischaracterize the genomic sequences obtained, i.e., labeling non-coding DNA as coding DNA and vice versa.

[0006] An alternative approach takes a more direct route to identifying and characterizing human genes. In this approach, complementary DNAs (cDNAs) are synthesized from isolated messenger RNAs (mRNAs) which encode human proteins. Using this approach, sequencing is only performed on DNA which is derived from protein coding fragments of the genome. Often, only short stretches of the cDNAs are sequenced to obtain sequences called expressed sequence tags (ESTs). The ESTs may then be used to isolate or purify cDNAs which include sequences adjacent to the EST sequences. The cDNAs may contain all of the sequence of the EST which was used to obtain them or only a fragment of the sequence of the EST which was used to obtain them. In addition, the cDNAs may contain the full coding sequence of the gene from which the EST was derived or, alternatively, the cDNAs may include fragments of the coding sequence of the gene from which the EST was derived. It will be appreciated that there may be several cDNAs which include the EST sequence as a result of alternate splicing or the activity of alternative promoters.

[0007] In the past, these short EST sequences were often obtained from oligo-dT primed cDNA libraries. Accordingly, they mainly corresponded to the 3′ untranslated region of the mRNA. In part, the prevalence of EST sequences derived from the 3′ end of the mRNA is a result of the fact that typical techniques for obtaining cDNAs are not well suited for isolating cDNA sequences derived from the 5′ ends of mRNAs (Adams et al, Nature 377:3-174, 1996, Hillier et al., Genome Res. 6:807-828, 1996). In addition, in those reported instances where longer cDNA sequences have been obtained, the reported sequences typically correspond to coding sequences and do not include the full 5′ untranslated region (5′UTR) of the mRNA from which the cDNA is derived. Indeed, 5′UTRs have been shown to affect either the stability or translation of mRNAs. Thus, regulation of gene expression may be achieved through the use of alternative 5′UTRs as shown, for instance, for the translation of the tissue inhibitor of metalloprotease mRNA in mitogenically activated cells (Waterhouse et al., J Biol Chem. 265:5585-9. 1990). Furthermore, modification of 5′UTR through mutation, insertion or translocation events may even be implied in pathogenesis. For instance, the Fragile X syndrome, the most common cause of inherited mental retardation, is partly due to an insertion of multiple CGG trinucleotides in the 5′UTR of the Fragile X mRNA resulting in the inhibition of protein synthesis via ribosome stalling (Feng et al., Science 268:731-4, 1995). An aberrant mutation in regions of the 5′UTR known to inhibit translation of the proto-oncogene c-myc was shown to result in upregulation of c-myc protein levels in cells derived from patients with multiple myelomas (Willis et al., Curr Top Microbiol Immunol 224:269-76, 1997). In addition, the use of oligo-dT primed cDNA libraries does not allow the isolation of complete 5′UTRs since such incomplete sequences obtained by this process may not include the first exon of the mRNA, particularly in situations where the first exon is short. Furthermore, they may not include some exons, often short ones, which are located upstream of splicing sites. Thus, there is a need to obtain sequences derived from the 5′ ends of mRNAs.

[0008] Moreover, despite the great amount of EST data that large-scale sequencing projects have yielded (Adams et al., Nature 377:174, 1996; Hillier et a., Genome Res. 6:807-828, 1996), information concerning the biological function of the mRNAs corresponding to such obtained cDNAs has revealed to be limited. Indeed, whereas the knowledge of the complete coding sequence is absolutely necessary to investigate the biological function of mRNAs, ESTs yield only partial coding sequences. So far, large-scale full-length cDNA cloning has been achieved only with limited success because of the poor efficiency of methods for constructing full-length cDNA libraries. Indeed, such methods require either a large amount of mRNA (Ederly et al., 1995), thus resulting in non representative full-length libraries when small amounts of tissue are available or require PCR amplification (Maruyama et al., 1994; CLONTECHniques, 1996) to obtain a reasonable number of clones, thus yielding strongly biased cDNA libraries where rare and long cDNAs are lost. Thus, there is a need to obtain full-length cDNAs, i.e. cDNAs containing the full coding sequence of their corresponding mRNAs.

[0009] While many sequences derived from human chromosomes have practical applications, approaches based on the identification and characterization of those chromosomal sequences which encode a protein product are particularly relevant to diagnostic and therapeutic uses. Of the 30,000-120,000 protein coding genes, those genes encoding proteins which are secreted from the cell in which they are synthesized, as well as the secreted proteins themselves, are particularly valuable as potential therapeutic agents. Such proteins are often involved in cell to cell communication and may be responsible for producing a clinically relevant response in their target cells. In fact, several secretory proteins, including tissue plasminogen activator, G-CSF, GM-CSF, erythropoietin, human growth hormone, insulin, interferon-α, interferon-β, interferon-γ, and interleukin-2, are currently in clinical use. These proteins are used to treat a wide range of conditions, including acute myocardial infarction, acute ischemic stroke, anemia, diabetes, growth hormone deficiency, hepatitis, kidney carcinoma, chemotherapy induced neutropenia and multiple sclerosis. For these reasons, cDNAs encoding secreted proteins or fragments thereof represent a particularly valuable source of therapeutic agents. Thus, there is a need for the identification and characterization of secreted proteins and the nucleic acids encoding them.

[0010] In addition to being therapeutically useful themselves, secretory proteins include short peptides, called signal peptides, at their amino termini which direct their secretion. These signal peptides are encoded by the signal sequences located at the 5′ ends of the coding sequences of genes encoding secreted proteins. Because these signal peptides will direct the extracellular secretion of any protein to which they are operably linked, the signal sequences may be exploited to direct the efficient secretion of any protein by operably linking the signal sequences to a gene encoding the protein for which secretion is desired. In addition, fragments of the signal peptides called membrane-translocating sequences may also be used to direct the intracellular import of a peptide or protein of interest. This may prove beneficial in gene therapy strategies in which it is desired to deliver a particular gene product to cells other than the cells in which it is produced. Signal sequences encoding signal peptides also find application in simplifying protein purification techniques. In such applications, the extracellular secretion of the desired protein greatly facilitates purification by reducing the number of undesired proteins from which the desired protein must be selected. Thus, there exists a need to identify and characterize the 5′ fragments of the genes for secretory proteins which encode signal peptides.

[0011] Sequences coding for secreted proteins may also find application as therapeutics or diagnostics. In particular, such sequences may be used to determine whether an individual is likely to express a detectable phenotype, such as a disease, as a consequence of a mutation in the coding sequence for a secreted protein. In instances where the individual is at risk of suffering from a disease or other undesirable phenotype as a result of a mutation in such a coding sequence, the undesirable phenotype may be corrected by introducing a normal coding sequence using gene therapy. Alternatively, if the undesirable phenotype results from overexpression of the protein encoded by the coding sequence, expression of the protein may be reduced using antisense or triple helix based strategies.

[0012] The secreted human polypeptides encoded by the coding sequences may also be used as therapeutics by administering them directly to an individual having a condition, such as a disease, resulting from a mutation in the sequence encoding the polypeptide. In such an instance, the condition can be cured or ameliorated by administering the polypeptide to the individual.

[0013] In addition, the secreted human polypeptides or fragments thereof may be used to generate antibodies useful in determining the tissue type or species of origin of a biological sample. The antibodies may also be used to determine the cellular localization of the secreted human polypeptides or the cellular localization of polypeptides which have been fused to the human polypeptides. In addition, the antibodies may also be used in immunoaffinity chromatography techniques to isolate, purify, or enrich the human polypeptide or a target polypeptide which has been fused to the human polypeptide.

[0014] Public information on the number of human genes for which the promoters and upstream regulatory regions have been identified and characterized is quite limited. In part, this may be due to the difficulty of isolating such regulatory sequences. Upstream regulatory sequences such as transcription factor binding sites are typically too short to be utilized as probes for isolating promoters from human genomic libraries. Recently, some approaches have been developed to isolate human promoters. One of them consists of making a CpG island library (Cross et al., Nature Genetics 6:236-244, 1994). The second consists of isolating human genomic DNA sequences containing SpeI binding sites by the use of SpeI binding protein (Mortlock et al., Genome Res. 6:327-335, 1996). Both of these approaches have their limits due to a lack of specificity and of comprehensiveness. Thus, there exists a need to identify and systematically characterize the 5′ fragments of the genes.

[0015] cDNAs including the 5′ ends of their corresponding mRNA may be used to efficiently identify and isolate 5′UTRs and upstream regulatory regions which control the location, developmental stage, rate, and quantity of protein synthesis, as well as the stability of the mRNA (Theil et al., BioFactors 4:87-93, (1993). Once identified and characterized, these regulatory regions may be utilized in gene therapy or protein purification schemes to obtain the desired amount and locations of protein synthesis or to inhibit, reduce, or prevent the synthesis of undesirable gene products.

[0016] In addition, cDNAs containing the 5′ ends of secretory protein genes may include sequences useful as probes for chromosome mapping and the identification of individuals. Thus, there is a need to identify and characterize the sequences upstream of the 5′ coding sequences of genes encoding secretory proteins.

### SUMMARY OF THE INVENTION

[0017] The present invention provides a purified or isolated polynucleotide comprising, consisting of, or consisting essentially of a nucleotide sequence selected from the group consisting of: (a) the sequences of SEQ ID NOs:1-169, 339-455, 561-784; (b) the sequences of clone inserts of the deposited clone pool; (c) the coding sequences of SEQ ID NOs:1-169, 339-455, 561-784; (d) the coding sequences of the clone inserts of the deposited clone pool; (e) the sequences encoding one of the polypeptides of SEQ ID NOs:170-338, 456-560, 785-918; (f) the sequences encoding one of the polypeptides encoded by the clone inserts of the deposited clone pool; (g) the genomic sequences coding for the GENSET polypeptides; (h) the 5′ transcriptional regulatory regions of GENSET genes; (i) the 3′ transcriptional regulatory regions of GENSET genes; (j) the polynucleotides comprising the nucleotide sequence of any combination of (g)-(i); (k) the variant polynucleotides of any of the polynucleotides of (a)-(j); (1) the polynucleotides comprising a nucleotide sequence of (a)-(k), wherein the polynucleotide is single stranded, double stranded, or a portion is single stranded and a portion is double stranded; (m) the polynucleotides comprising a nucleotide sequence complementary to any of the single stranded polynucleotides of (l). The invention further provides for fragments of the nucleic acid molecules of (a)-(m) described above.

[0018] Further embodiments of the invention include purified or isolated polynucleotides that comprise, consist of, or consist essentially of a nucleotide sequence at least 70% identical, more preferably at least 75%, and even more preferably at least 80%, 85%, 90%, 95%, 96%, 97%, 98%, or 99% identical, to any of the nucleotide sequences in (a)-(m) above, e.g. over a region of at least about 25, 50, 100, 150, 250, 500, 1000, or more contiguous nucleotides, or a polynucleotide which hybridizes under stringent hybridization conditions to a polynucleotide in (a)-(m) above.

[0019] The present invention also relates to recombinant vectors, which include the purified or isolated polynucleotides of the present invention, and to host cells recombinant for the polynucleotides of the present invention, as well as to methods of making such vectors and host cells. The present invention further relates to the use of these recombinant vectors and recombinant host cells in the production of GENSET polypeptides.

[0020] The invention further provides a purified or isolated polypeptide comprising, consisting of, or consisting essentially of an amino acid sequence selected from the group consisting of: (a) the polypeptides of SEQ ID NOs:170-338, 456-560, 785-918; (b) the polypeptides encoded by the clone inserts of the deposited clone pool; (c) the epitope-bearing fragments of the polypeptides of SEQ ID NOs:170-338, 456-560, 785-918; (d) the epitope-bearing fragments of the polypeptides encoded by the clone inserts contained in the deposited clone pool; (e) the domains of the polypeptides of SEQ ID NOs: 170-338, 456-560, 785-918; (f) the domains of the polypeptides encoded by the clone inserts contained in the deposited clone pool; and (g) the allelic variant polypeptides of any of the polypeptides of (a)-(f). The invention further provides for fragments of the polypeptides of (a)-(g) above, such as those having biological activity or comprising biologically functional domain(s).

[0021] The present invention further includes polypeptides with an amino acid sequence with at least 70% similarity, and more preferably at least 75%, 80%, 85%, 90%, 95%, 96%, 97%, 98%, or 99% similarity to those polypeptides described in (a)-(g), as well as polypeptides having an amino acid sequence at least 70% identical, more preferably at least 75% identical, and still more preferably 80%, 85%, 90%, 95%, 96%, 97%, 98%, or 99% identical to those polypeptides described in (a)-(g), e.g. over a region of at least about 25, 50, 100, 150, 250, 500, 1000, or more amino acids. The invention further relates to methods of making the polypeptides of the present invention.

[0022] The present invention further relates to transgenic plants or animals, wherein said transgenic plant or animal is transgenic for a polynucleotide of the present invention and expresses a polypeptide of the present invention.

[0023] The invention further relates to antibodies that specifically bind to GENSET polypeptides of the present invention and fragments thereof as well as to methods for producing such antibodies and fragments thereof.

[0024] The invention also provides kits, uses and methods for detecting GENSET gene expression and/or biological activity in a biological sample. One such method involves assaying for the expression of a GENSET polynucleotide in a biological sample using the polymerase chain reaction (PCR) to amplify and detect GENSET polynucleotides or Southern and Northern blot hybridization to detect GENSET genomic DNA, cDNA or mRNA. Alternatively, a method of detecting GENSET gene expression in a test sample can be accomplished using a compound which binds to a GENSET polypeptide of the present invention or a portion of a GENSET polypeptide.

[0025] The present invention also relates to diagnostic methods and uses of GENSET polynucleotides and polypeptides for identifying individuals or non-human animals having elevated or reduced levels of GENSET gene products, which individuals are likely to benefit from therapies to suppress or enhance GENSET gene expression, respectively, and to methods of identifying individuals or non-human animals at increased risk for developing, or at present having, certain diseases/disorders associated with GENSET polypeptide expression or biological activity.

[0026] The present invention also relates to kits, uses and methods of screening compounds for their ability to modulate (e.g. increase or inhibit) the activity or expression of GENSET polypeptides including compounds that interact with GENSET gene regulatory sequences and compounds that interact directly or indirectly with a GENSET polypeptide. Uses of such compounds are also within the scope of the present invention.

[0027] The present invention also relates to pharmaceutical or physiologically acceptable compositions comprising, an active agent, the polypeptides, polynucleotides or antibodies of the present invention, as well as, typically, a pharmaceutically acceptable carrier.

[0028] The present invention also relates to computer systems containing cDNA codes and polypeptide codes of sequences of the invention and to computer-related methods of comparing sequences, identifying homology or features using GENSET polypeptides or GENSET polynucleotide sequences of the invention.

[0029] In another aspect, the present invention provides an isolated polynucleotide, the polynucleotide comprising a nucleic acid sequence encoding: i) a polypeptide comprising an amino acid sequence having at least about 80% identity to any one of the sequences shown as SEQ ID NOs:170-338, 456-560, 785-918 or any one of the sequences of polypeptides encoded by the clone inserts of the deposited clone pool; or a biologically active fragment of the polypeptide.

[0030] In one embodiment, the polypeptide comprises any one of the sequences shown as SEQ ID NOs:170-338, 456-560, 785-918 or any one of the sequences of the polypeptides encoded by the clone inserts of the deposited clone pool. In another embodiment, the polypeptide comprises a signal peptide. In another embodiment, the polypeptide is a mature protein. In another embodiment, the nucleic acid sequence has at least about 80% identity over at least about 100 contiguous nucleotides to any one of the sequences shown as SEQ ID NOs:1-169, 339-455, 561-784 or any one of the sequences of the clone inserts of the deposited clone pool. In another embodiment, the polynucleotide hybridizes under stringent conditions to a polynucleotide comprising any one of the sequences shown as SEQ ID NOs:1-169, 339-455, 561-784 or any one of the sequences of the clone inserts of the deposited clone pool. In another embodiment, the nucleic acid sequence comprises any one of the sequences shown as SEQ ID NOs:1-169, 339-455, 561-784 or any one the sequences of the clone inserts of the deposited clone pool. In another embodiment, the polynucleotide is operably linked to a promoter.

[0031] In another aspect, the present invention provides an expression vector comprising any of the herein-described polynucleotides, operably linked to a promoter. In another aspect, the present invention provides a host cell recombinant for any of the herein-described polynucleotides. In another aspect, the present invention provides a non-human transgenic animal comprising the host cell.

[0032] In another aspect, the present invention provides a method of making a GENSET polypeptide, the method comprising a) providing a population of host cells comprising a herein-described polynucleotide and b) culturing the population of host cells under conditions conducive to the production of the polypeptide within said host cells.

[0033] In one embodiment, the method further comprises purifying the polypeptide from the population of host cells.

[0034] In another aspect, the present invention provides a method of making a GENSET polypeptide, the method comprising a) providing a population of cells comprising a polynucleotide encoding a herein-described polypeptide; b) culturing the population of cells under conditions conducive to the production of the polypeptide within the cells; and c) purifying the polypeptide from the population of cells.

[0035] In another aspect, the present invention provides an isolated polynucleotide, the polynucleotide comprising a nucleic acid sequence having at least about 80% identity over at least about 100 contiguous nucleotides to any one of the sequences shown as SEQ ID NOs:1-169, 339-455, 561-784 or any one of the sequences of the clone inserts of the deposited clone pool.

[0036] In one embodiment, the polynucleotide hybridizes under stringent conditions to a polynucleotide comprising any one of the sequences shown as SEQ ID NOs:1-169, 339-455, 561-784 or any one of the sequences of the clone inserts of the deposited clone pool. In another embodiment, the polynucleotide comprises any one of the sequences shown as SEQ ID NOs:1-169, 339-455, 561-784 or any one of the sequences of the clone inserts of the deposited clone pool.

[0037] In another aspect, the present invention provides a biologically active polypeptide encoded by any of the herein-described polynucleotides.

[0038] In another aspect, the present invention provides an isolated polypeptide or biologically active fragment thereof, the polypeptide comprising an amino acid sequence having at least about 80% sequence identity to any one of the sequences shown as SEQ ID NOs:170-338, 456-560, 785-918 or any one of the sequences of polypeptides encoded by the clone inserts of the deposited clone pool.

[0039] In one embodiment, the polypeptide is selectively recognized by an antibody raised against an antigenic polypeptide, or an antigenic fragment thereof, the antigenic polypeptide comprising any one of the sequences shown as SEQ ID NOs:170-338, 456-560, 785-918 or any one of the sequences of polypeptides encoded by the clone inserts of the deposited clone pool. In another embodiment, the polypeptide comprises any one of the sequences shown as SEQ ID NOs:170-338, 456-560, 785-918 or any one of the sequences of polypeptides encoded by the clone inserts of the deposited clone pool. In another embodiment, the polypeptide comprises a signal peptide. In another embodiment, the polypeptide is a mature protein.

[0040] In another aspect, the present invention provides an antibody that specifically binds to any of ther herein-described polypeptides.

[0041] In another aspect, the present invention provides a method of determining whether a GENSET gene is expressed within a mammal, the method comprising the steps of: a) providing a biological sample from said mammal; b) contacting said biological sample with either of: i) a polynucleotide that hybridizes under stringent conditions to any of the herein-described polynucleotides; or ii) a polypeptide that specifically binds to any of the herein-described polypeptides; and c) detecting the presence or absence of hybridization between the polynucleotide and an RNA species within the sample, or the presence or absence of binding of the polypeptide to a protein within the sample; wherein a detection of the hybridization or of the binding indicates that the GENSET gene is expressed within the mammal.

[0042] In one embodiment, the polynucleotide is a primer, and the hybridization is detected by detecting the presence of an amplification product comprising the sequence of the primer. In another embodiment, the polypeptide is an antibody.

[0043] In another aspect, the present invention provides a method of determining whether a mammal has an elevated or reduced level of GENSET gene expression, the method comprising the steps of: a) providing a biological sample from the mammal; and b) comparing the amount of any of the herein-described polypeptides, or of an RNA species encoding the polypeptide, within the biological sample with a level detected in or expected from a control sample; wherein an increased amount of the polypeptide or the RNA species within the biological sample compared to the level detected in or expected from the control sample indicates that the mammal has an elevated level of the GENSET gene expression, and wherein a decreased amount of the polypeptide or the RNA species within the biological sample compared to the level detected in or expected from the control sample indicates that the mammal has a reduced level of the GENSET gene expression.

[0044] In another aspect, the present invention provides a method of identifying a candidate modulator of a GENSET polypeptide, the method comprising: a) contacting any of the herein-described polypeptides with a test compound; and b) determining whether the compound specifically binds to the polypeptide; wherein a detection that the compound specifically binds to the polypeptide indicates that the compound is a candidate modulator of the GENSET polypeptide.

[0045] In one embodiment, the method further comprises testing the biological activity of the GENSET polypeptide in the presence of the candidate modulator, wherein an alteration in the biological activity of the GENSET polypeptide in the presence of the compound in comparison to the activity in the absence of said compound indicates that the compound is a modulator of the GENSET polypeptide.

[0046] In another aspect, the present invention provides a method for the production of a pharmaceutical composition, the method comprising a) identifying a modulator of a GENSET polypeptide using any of the herein-described methods; and b) combining the modulator with a pharmaceutically acceptable carrier.

### BRIEF DESCRIPTION OF DRAWINGS

[0047] FIG. 1 is a block diagram of an exemplary computer system.

[0048] FIG. 2 is a flow diagram illustrating one embodiment of a process 200 for comparing a new nucleotide or protein sequence with a database of sequences in order to determine the identity levels between the new sequence and the sequences in the database.

[0049] FIG. 3 is a flow diagram illustrating one embodiment of a process 250 in a computer for determining whether two sequences are homologous.

[0050] FIG. 4 is a flow diagram illustrating one embodiment of an identifier process 300 for detecting the presence of a feature in a sequence.

### BRIEF DESCRIPTION OF THE TABLES

[0051] Table I provides the SEQ ID Nos in the present application (with the SEQ ID Nos corresponding to nucleic acid sequences preceded by “NUC”, and the SEQ ID Nos corresponding to the encoded polypeptide sequences preceded by “PRT”) that correspond to a SEQ ID NO in priority application number 60/197,873. Applicants' internal designation number (Clone ID) corresponding to each sequence identification (SEQ ID) number is also provided.

[0052] Table II lists the putative chromosomal location of the polynucleotides of the present invention. The SEQ ID NO listed for each polynucleotide is that from the priority application 60/197,873; the corresponding SEQ ID NOs for the sequence in the present application can be determined by referring to Table I.

[0053] Table III lists the number of hits in Genset's cDNA libraries of tissues and cell types for polynucleotides of the invention. The following abbreviations are used to refer to each cell or tissue type: A=Brain; B=Fetal brain; C=Fetal kidney; D=Fetal liver; E=Pituitary gland; F=Liver; G=Placenta; H=Prostate; I=Salivary gland; J=Stomach/Intestine; and K=Testis. The SEQ ID NO listed for each polynucleotide is that from the priority application 60/197,873; the corresponding SEQ ID NOs for the sequence in the present application can be determined by referring to Table I.

[0054] Table IV lists the number of hits in publicly available library of tissues and cell types for polynucleotides of the invention. The SEQ ID NO listed for each polynucleotide is that from the priority application 60/197,873; the corresponding SEQ ID NOs for each sequence in the present application can be determined by referring to Table I.

[0055] Table V lists the tissues and cell types in which the polynucleotide sequences of the present invention are over- or under-represented. The SEQ ID NO listed for each polynucleotide is that from the priority application 60/197,873; the corresponding SEQ ID NOs for each sequence in the present application can be determined by referring to Table I.

### BRIEF DESCRIPTION OF THE SEQUENCE LISTING

[0056] SEQ ID NOs:1-169, 339-455, 561-784 are the nucleotide sequences of cDNAs, with open reading frames as indicated as features (CDS). When appropriate, the locations of the potential polyadenylation site and polyadenylation signal are also indicated.

[0057] SEQ ID NOs:170-338, 456-560, 785-918 are the amino acid sequences of proteins encoded by the cDNAs of SEQ ID NOs:1-169, 339-455, 561-784.

[0058] SEQ ID NOs:1-85, 339-400, 406-407, 413-415, 561-594, and 634-651 are the nucleotide sequences of cDNAs encoding a potentially secreted protein. The locations of the ORFs and sequences encoding signal peptides are listed in the accompanying Sequence Listing. In addition, the von Heijne score of the signal peptide computed as described below is listed as the “score” in the accompanying Sequence Listing. The sequence of the signal-peptide is listed as “seq” in the accompanying Sequence Listing. The “/” in the signal peptide sequence indicates the location where proteolytic cleavage of the signal peptide occurs to generate a mature protein. When appropriate, the locations of the first and last nucleotides of the coding sequences, eventually the locations of the first and last nucleotides of the polyA and the locations of the first and last nucleotides of the polyA sites are indicated.

[0059] SEQ ID NOs:86-169, 401-405, 408-412, 416-455, 595-633, 652-784 are the nucleotide sequences of cDNAs in which no sequence encoding a signal peptide has been identified to date. However, it remains possible that subsequent analysis will identify a sequence encoding a signal peptide in these nucleic acids. The locations of the ORFs are listed in the accompanying Sequence Listing. When appropriate, the locations of the first and last nucleotides of the coding sequences, eventually the locations of the first and last nucleotides of the polyA and the locations of the first and last nucleotides of the polyA sites are indicated.

[0060] SEQ ID NOs:170-254, 456-517, 520-521, 527-529, 785-818, and 858-875 are the amino acid sequences of polypeptides which contain a signal peptide. These polypeptides are encoded by the cDNAs of SEQ ID NOs: 1-85, 339-400, 406-407, 413-415, 561-594, and 634-651. The location of the signal peptide is listed in the accompanying Sequence Listing.

[0061] SEQ ID NOs:255-338, 517-519, 522-526, 530-560, 819-857, 876-918 are the amino acid sequences of polypeptides in which no signal peptide has been identified to date. However, it remains possible that subsequent analysis will identify a signal peptide in these polypeptides. These polypeptides are encoded by the nucleic acids of SEQ ID NOs: 86-169, 401-405, 408-412, 416-455, 595-633, 652-784.

[0062] In accordance with the regulations relating to Sequence Listings, the following codes have been used in the Sequence Listing to describes nucleotide sequences. The code “r” in the sequences indicates that the nucleotide may be a guanine or an adenine. The code “y” in the sequences indicates that the nucleotide may be a thymine or a cytosine. The code “m” in the sequences indicates that the nucleotide may be an adenine or a cytosine. The code “k” in the sequences indicates that the nucleotide may be a guanine or a thymine. The code “s” in the sequences indicates that the nucleotide may be a guanine or a cytosine. The code “w” in the sequences indicates that the nucleotide may be an adenine or an thymine. In addition, all instances of the symbol “n” in the nucleic acid sequences mean that the nucleotide can be adenine, guanine, cytosine or thymine.

[0063] In some instances, the polypeptide sequences in the Sequence Listing contain the symbol “Xaa.” These “Xaa” symbols indicate either (1) a residue which cannot be identified because of nucleotide sequence ambiguity or (2) a stop codon in the determined sequence where applicants believe one should not exist (if the sequence were determined more accurately). In some instances, several possible identities of the unknown amino acids may be suggested by the genetic code.

[0064] In the case of secreted proteins, it should be noted that, in accordance with the regulations governing Sequence Listings, in the appended Sequence Listing the encoded protein (i.e. the protein containing the signal peptide and the mature protein or part thereof) extends from an amino acid residue having a negative number through a positively numbered amino acid residue. Thus, the first amino acid of the mature protein resulting from cleavage of the signal peptide is designated as amino acid number 1, and the first amino acid of the signal peptide is designated with the appropriate negative number.

### DETAILED DESCRIPTION OF THE INVENTION AND PREFERRED EMBODIMENTS

### Definitions

[0065] Before describing the invention in greater detail, the following definitions are set forth to illustrate and define the meaning and scope of the terms used to describe the invention herein.

[0066] The term “GENSET gene,” when used herein, encompasses genomic, mRNA and cDNA sequences encoding a GENSET polypeptide, including the 5′ and 3′ untranslated regions of said sequences.

[0067] The term “GENSET polypeptide biological activity” or “GENSET biological activity” is intended for polypeptides exhibiting any activity similar, but not necessarily identical, to an activity of a GENSET polypeptide of the invention. The GENSET polypeptide biological activity of a given polypeptide may be assessed using any suitable biological assay, a number of which are known to those skilled in the art. In contrast, the term “biological activity” refers to any activity that any polypeptide may have.

[0068] The term “corresponding mRNA” refers to mRNA which was or can be a template for cDNA synthesis for producing a cDNA of the present invention.

[0069] The term “corresponding genomic DNA” refers to genomic DNA which encodes an mRNA of interest, e.g. corresponding to a cDNA of the invention, which genomic DNA includes the sequence of one of the strands of the mRNA, in which thymidine residues in the sequence of the genomic DNA (or cDNA) are replaced by uracil residues in the mRNA.

[0070] The term “deposited clone pool” is used herein to refer to the pool of clones entitled cDNA-8-2000, deposited with the ATCC on Sep. 27, 2000, or the pool of clones entitled cDNA-11-2000, deposited with the ATCC on Nov. 27, 2000, or any other deposited clone pool containing a clone corresponding to any of the herein-described sequences.

[0071] The term “heterologous”, when used herein, is intended to designate any polynucleotide or polypeptide other than a GENSET polynucleotide or GENSET polypeptide of the invention, respectively.

[0072] “Providing” with respect to, e.g. a biological sample, population of cells, etc. indicates that the sample, population of cells, etc. is somehow used in a method or procedure. Significantly, “providing” a biological sample or population of cells does not require that the sample or cells are specifically isolated or obtained for the purposes of the invention, but can instead refer, for example, to the use of a biological sample obtained by another individual, for another purpose.

[0073] An “amplification product” refers to a product of any amplification reaction, e.g. PCR, RT-PCR, LCR, etc.

[0074] A “modulator” of a protein or other compound refers to any agent that has a functional effect on the protein, including physical binding to the protein, alterations of the quantity or quality of expression of the protein, altering any measurable or detectable activity, property, or behavior of the protein, or in any way interacts with the protein or compound.

[0075] “A test compound” can be any molecule that is evaluated for its ability to modulate a protein or other compound.

[0076] An antibody or other compound that specifically binds to a polypeptide or polynucleotide of the invention is also said to “selectively recognize” the polypeptide or polynucleotide.

[0077] The term “isolated” with respect to a molecule requires that the molecule be removed from its original environment (e. g., the natural environment if it is naturally occurring). For example, a naturally-occurring polynucleotide or polypeptide present in a living animal is not isolated, but the same polynucleotide or DNA or polypeptide, separated from some or all of the coexisting materials in the natural system, is isolated. Such polynucleotide could be part of a vector and/or such polynucleotide or polypeptide could be part of a composition, and still be isolated in that the vector or composition is not part of its natural environment. For example, a naturally-occurring polynucleotide present in a living animal is not isolated, but the same polynucleotide, separated from some or all of the coexisting materials in the natural system, is isolated. Specifically excluded from the definition of “isolated” are: naturally-occurring chromosomes (such as chromosome spreads), artificial chromosome libraries, genomic libraries, and cDNA libraries that exist either as an in vitro nucleic acid preparation or as a transfected/transformed host cell preparation, wherein the host cells are either an in vitro heterogeneous preparation or plated as a heterogeneous population of single colonies. Also specifically excluded are the above libraries wherein a specified polynucleotide makes up less than 5% of the number of nucleic acid inserts in the vector molecules. Further specifically excluded are whole cell genomic DNA or whole cell RNA preparations (including said whole cell preparations which are mechanically sheared or enzymatically digested). Further specifically excluded are the above whole cell preparations as either an in vitro preparation or as a heterogeneous mixture separated by electrophoresis (including blot transfers of the same) wherein the polynucleotide of the invention has not further been separated from the heterologous polynucleotides in the electrophoresis medium (e.g., further separating by excising a single band from a heterogeneous band population in an agarose gel or nylon blot).

[0078] The term “purified” does not require absolute purity; rather, it is intended as a relative definition. Purification of starting material or natural material to at least one order of magnitude, preferably two or three orders, and more preferably four or five orders of magnitude is expressly contemplated. As an example, purification from 0.1% concentration to 10% concentration is two orders of magnitude. To illustrate, individual cDNA clones isolated from a cDNA library have been conventionally purified to electrophoretic homogeneity. The sequences obtained from these clones could not be obtained directly either from the library or from total human DNA. The cDNA clones are not naturally occurring as such, but rather are obtained via manipulation of a partially purified naturally occurring substance (messenger RNA). The conversion of mRNA into a cDNA library involves the creation of a synthetic substance (cDNA) and pure individual cDNA clones can be isolated from the synthetic library by clonal selection. Thus, creating a cDNA library from messenger RNA and subsequently isolating individual clones from that library results in an approximately 10⁴-10⁶ fold purification of the native message.

[0079] The term “purified” is further used herein to describe a polypeptide or polynucleotide of the invention which has been separated from other compounds including, but not limited to, polypeptides or polynucleotides, carbohydrates, lipids, etc. The term “purified” may be used to specify the separation of monomeric polypeptides of the invention from oligomeric forms such as homo- or hetero-dimers, trimers, etc. The term “purified” may also be used to specify the separation of covalently closed (i.e. circular) polynucleotides from linear polynucleotides. A polynucleotide is substantially pure when at least about 50%, preferably 60 to 75% of a sample exhibits a single polynucleotide sequence and conformation (linear versus covalently close). A substantially pure polypeptide or polynucleotide typically comprises about 50%, preferably 60 to 90% weight/weight of a polypeptide or polynucleotide sample, respectively, more usually about 95%, and preferably is over about 99% pure. Polypeptide and polynucleotide purity, or homogeneity, is indicated by a number of means well known in the art, such as agarose or polyacrylamide gel electrophoresis of a sample, followed by visualizing a single band upon staining the gel. For certain purposes higher resolution can be provided by using HPLC or other means well known in the art. As an alternative embodiment, purification of the polypeptides and polynucleotides of the present invention may be expressed as “at least” a percent purity relative to heterologous polypeptides and polynucleotides (DNA, RNA or both). As a preferred embodiment, the polypeptides and polynucleotides of the present invention are at least; 10%, 20%, 30%, 40%, 50%, 60%, 70%, 80%, 90%, 95%, 96%, 96%, 98%, 99%, or 100% pure relative to heterologous polypeptides and polynucleotides, respectively. As a further preferred embodiment the polypeptides and polynucleotides have a purity ranging from any number, to the thousandth position, between 90% and 100% (e.g., a polypeptide or polynucleotide at least 99.995% pure) relative to either heterologous polypeptides or polynucleotides, respectively, or as a weight/weight ratio relative to all compounds and molecules other than those existing in the carrier. Each number representing a percent purity, to the thousandth position, may be claimed as individual species of purity.

[0080] As used interchangeably herein, the terms “nucleic acid molecule(s)”, “oligonucleotide(s)”, and “polynucleotide(s)” include RNA or DNA (either single or double stranded, coding, complementary or antisense), or RNA/DNA hybrid sequences of more than one nucleotide in either single chain or duplex form (although each of the above species may be particularly specified). The term “nucleotide” is used herein as an adjective to describe molecules comprising RNA, DNA, or RNA/DNA hybrid sequences of any length in single-stranded or duplex form. More precisely, the expression “nucleotide sequence” encompasses the nucleic material itself and is thus not restricted to the sequence information (i.e. the succession of letters chosen among the four base letters) that biochemically characterizes a specific DNA or RNA molecule. The term “nucleotide” is also used herein as a noun to refer to individual nucleotides or varieties of nucleotides, meaning a molecule, or individual unit in a larger nucleic acid molecule, comprising a purine or pyrimidine, a ribose or deoxyribose sugar moiety, and a phosphate group, or phosphodiester linkage in the case of nucleotides within an oligonucleotide or polynucleotide. The term “nucleotide” is also used herein to encompass “modified nucleotides” which comprise at least one modification such as (a) an alternative linking group, (b) an analogous form of purine, (c) an analogous form of pyrimidine, or (d) an analogous sugar. For examples of analogous linking groups, purine, pyrimidines, and sugars, see, for example, PCT publication No. WO 95/04064, which disclosure is hereby incorporated by reference in its entirety. Preferred modifications of the present invention include, but are not limited to, 5-fluorouracil, 5-bromouracil, 5-chlorouracil, 5-iodouracil, hypoxanthine, xantine, 4-acetylcytosine, 5-(carboxyhydroxylmethyl) uracil, 5-carboxymethylaminomethyl-2-thiouridine, 5-carboxymethylaminomethyluracil, dihydrouracil, beta-D-galactosylqueosine, inosine, N6-isopentenyladenine, 1-methylguanine, 1-methylinosine, 2,2-dimethylguanine, 2-methyladenine, 2-methylguanine, 3-methylcytosine, 5-methylcytosine, N6-adenine, 7-methylguanine, 5-methylaminomethyluracil, 5-methoxyaminomethyl-2-thiouracil, beta-D-mannosylqueosine, 5′-methoxycarboxymethyluracil, 5-methoxyuracil, 2-methylthio-N6-isopentenyladenine, uracil-5-oxyacetic acid (v) ybutoxosine, pseudouracil, queosine, 2-thiocytosine, 5-methyl-2-thiouracil, 2-thiouracil, 4-thiouracil, 5-methyluracil, uracil-5-oxyacetic acid methylester, uracil-5-oxyacetic acid, 5-methyl-2-thiouracil, 3-(3-amino-3-N-2-carboxypropyl) uracil, and 2,6-diaminopurine. The polynucleotide sequences of the invention may be prepared by any known method, including synthetic, recombinant, ex vivo generation, or a combination thereof, as well as utilizing any purification methods known in the art. Methylenemethylimino linked oligonucleosides as well as mixed backbone compounds having, may be prepared as described in U.S. Pat. Nos. 5,378,825; 5,386,023; 5,489,677; 5,602,240; and 5,610,289, which disclosures are hereby incorporated by reference in their entireties. Formacetal and thioformacetal linked oligonucleosides may be prepared as described in U.S. Pat. Nos. 5,264,562 and 5,264,564, which disclosures are hereby incorporated by reference in their entireties. Ethylene oxide linked oligonucleosides may be prepared as described in U.S. Pat. No. 5,223,618, which disclosure is hereby incorporated by reference in its entirety. Phosphinate oligonucleotides may be prepared as described in U.S. Pat. No. 5,508,270, which disclosure is hereby incorporated by reference in its entirety. Alkyl phosphonate oligonucleotides may be prepared as described in U.S. Pat. No. 4,469,863, which disclosure is hereby incorporated by reference in its entirety. 3′-Deoxy-3′-methylene phosphonate oligonucleotides may be prepared as described in U.S. Pat. Nos. 5,610,289 or 5,625,050 which disclosures are hereby incorporated by reference in their entireties. Phosphoramidite oligonucleotides may be prepared as described in U.S. Pat. No. 5,256,775 or U.S. Pat. No. 5,366,878 which disclosures are hereby incorporated by reference in their entireties. Alkylphosphonothioate oligonucleotides may be prepared as described in published PCT applications WO 94/17093 and WO 94/02499 which disclosures are hereby incorporated by reference in their entireties. 3′-Deoxy-3′-amino phosphoramidite oligonucleotides may be prepared as described in U.S. Pat. No. 5,476,925, which disclosure is hereby incorporated by reference in its entirety. Phosphotriester oligonucleotides may be prepared as described in U.S. Pat. No. 5,023,243, which disclosure is hereby incorporated by reference in its entirety. Borano phosphate oligonucleotides may be prepared as described in U.S. Pat. Nos. 5,130,302 and 5,177,198 which disclosures are hereby incorporated by reference in their entireties.

[0081] The term “upstream” is used herein to refer to a location which is toward the 5′ end of the polynucleotide from a specific reference point.

[0082] The terms “base paired” and “Watson & Crick base paired” are used interchangeably herein to refer to nucleotides which can be hydrogen bonded to one another by virtue of their sequence identities in a manner like that found in double-helical DNA with thymine or uracil residues linked to adenine residues by two hydrogen bonds and cytosine and guanine residues linked by three hydrogen bonds (see Stryer, 1995, which disclosure is hereby incorporated by reference in its entirety).

[0083] The terms “complementary” or “complement thereof” are used herein to refer to the sequences of polynucleotides which is capable of forming Watson & Crick base pairing with another specified polynucleotide throughout the entirety of the complementary region. For the purpose of the present invention, a first polynucleotide is deemed to be complementary to a second polynucleotide when each base in the first polynucleotide is paired with its complementary base. Complementary bases are, generally, A and T (or A and U), or C and G. “Complement” is used herein as a synonym from “complementary polynucleotide”, “complementary nucleic acid” and “complementary nucleotide sequence”. These terms are applied to pairs of polynucleotides based solely upon their sequences and not any particular set of conditions under which the two polynucleotides would actually bind. Unless otherwise stated, all complementary polynucleotides are fully complementary on the whole length of the considered polynucleotide.

[0084] The terms “polypeptide” and “protein”, used interchangeably herein, refer to a polymer of amino acids without regard to the length of the polymer; thus, peptides, oligopeptides, and proteins are included within the definition of polypeptide. This term also does not specify or exclude chemical or post-expression modifications of the polypeptides of the invention, although chemical or post-expression modifications of these polypeptides may be included excluded as specific embodiments. Therefore, for example, modifications to polypeptides that include the covalent attachment of glycosyl groups, acetyl groups, phosphate groups, lipid groups and the like are expressly encompassed by the term polypeptide. Further, polypeptides with these modifications may be specified as individual species to be included or excluded from the present invention. The natural or other chemical modifications, such as those listed in examples above can occur anywhere in a polypeptide, including the peptide backbone, the amino acid side-chains and the amino or carboxyl termini. It will be appreciated that the same type of modification may be present in the same or varying degrees at several sites in a given polypeptide. Also, a given polypeptide may contain many types of modifications. Polypeptides may be branched, for example, as a result of ubiquitination, and they may be cyclic, with or without branching. Modifications include acetylation, acylation, ADP-ribosylation, amidation, covalent attachment of flavin, covalent attachment of a heme moiety, covalent attachment of a nucleotide or nucleotide derivative, covalent attachment of a lipid or lipid derivative, covalent attachment of phosphotidylinositol, cross-linking, cyclization, disulfide bond formation, demethylation, formation of covalent cross-links, formation of cysteine, formation of pyroglutamate, formylation, gamma-carboxylation, glycosylation, GPI anchor formation, hydroxylation, iodination, methylation, myristoylation, oxidation, pegylation, proteolytic processing, phosphorylation, prenylation, racemization, selenoylation, sulfation, transfer-RNA mediated addition of amino acids to proteins such as arginylation, and ubiquitination. (See, for instance Creighton (1993); Seifter et al., (1990); Rattan et al., (1992)). Also included within the definition are polypeptides which contain one or more analogs of an amino acid (including, for example, non-naturally occurring amino acids, amino acids which only occur naturally in an unrelated biological system, modified amino acids from mammalian systems, etc.), polypeptides with substituted linkages, as well as other modifications known in the art, both naturally occurring and non-naturally occurring.

[0085] As used herein, the terms “recombinant polynucleotide” and “polynucleotide construct” are used interchangeably to refer to linear or circular, purified or isolated polynucleotides that have been artificially designed and which comprise at least two nucleotide sequences that are not found as contiguous nucleotide sequences in their initial natural environment. In particular, these terms mean that the polynucleotide or cDNA is adjacent to “backbone” nucleic acid to which it is not adjacent in its natural environment. Additionally, to be “enriched” the cDNAs will represent 5% or more of the number of nucleic acid inserts in a population of nucleic acid backbone molecules. Backbone molecules according to the present invention include nucleic acids such as expression vectors, self-replicating nucleic acids, viruses, integrating nucleic acids, and other vectors or nucleic acids used to maintain or manipulate a nucleic acid insert of interest. Preferably, the enriched cDNAs represent 15% or more of the number of nucleic acid inserts in the population of recombinant backbone molecules. More preferably, the enriched cDNAs represent 50% or more of the number of nucleic acid inserts in the population of recombinant backbone molecules. In a highly preferred embodiment, the enriched cDNAs represent 90% or more (including any number between 90 and 100%, to the thousandth position, e.g., 99.5%) of the number of nucleic acid inserts in the population of recombinant backbone molecules.

[0086] The term “recombinant polypeptide” is used herein to refer to polypeptides that have been artificially designed and which comprise at least two polypeptide sequences that are not found as contiguous polypeptide sequences in their initial natural environment, or to refer to polypeptides which have been expressed from a recombinant polynucleotide.

[0087] As used herein, the term “operably linked” refers to a linkage of polynucleotide elements in a functional relationship. A sequence which is “operably linked” to a regulatory sequence such as a promoter means that said regulatory element is in the correct location and orientation in relation to the nucleic acid to control RNA polymerase initiation and expression of the nucleic acid of interest. For instance, a promoter or enhancer is operably linked to a coding sequence if it affects the transcription of the coding sequence.

[0088] As used herein, the term “non-human animal” refers to any non-human animal, including insects, birds, rodents and more usually mammals. Preferred non-human animals include: primates; farm animals such as swine, goats, sheep, donkeys, cattle, horses, chickens, rabbits; and rodents, preferably rats or mice. As used herein, the term “animal” is used to refer to any species in the animal kingdom, preferably vertebrates, including birds and fish, and more preferable a mammal. Both the terms “animal” and “mammal” expressly embrace human subjects unless preceded with the term “non-human”.

[0089] The term “domain” refers to an amino acid fragment with specific biological properties. This term encompasses all known structural and linear biological motifs. Examples of such motifs include but are not limited to leucine zippers, helix-turn-helix motifs, glycosylation sites, ubiquitination sites, alpha helices, and beta sheets, signal peptides which direct the secretion of proteins, sites for post-translational modification, enzymatic active sites, substrate binding sites, and enzymatic cleavage sites.

[0090] Although each of these terms has a distinct meaning, the terms “comprising”, “consisting of” and “consisting essentially of” may be interchanged for one another throughout the instant application. The term “having” has the same meaning as “comprising” and may be replaced with either the term “consisting of” or “consisting essentially of”.

[0091] Unless otherwise specified in the application, nucleotides and amino acids of polynucleotides and polypeptides, respectively, of the present invention are contiguous and not interrupted by heterologous sequences.

Identity Between Nucleic Acids Or Polypeptides

[0092] The terms “percentage of sequence identity” and “percentage homology” are used interchangeably herein to refer to comparisons among polynucleotides and polypeptides, and are determined by comparing two optimally aligned sequences over a comparison window, wherein the portion of the polynucleotide or polypeptide sequence in the comparison window may comprise additions or deletions (i.e., gaps) as compared to the reference sequence (which does not comprise additions or deletions) for optimal alignment of the two sequences. The percentage is calculated by determining the number of positions at which the identical nucleic acid base or amino acid residue occurs in both sequences to yield the number of matched positions, dividing the number of matched positions by the total number of positions in the window of comparison and multiplying the result by 100 to yield the percentage of sequence identity. Homology is evaluated using any of the variety of sequence comparison algorithms and programs known in the art. Such algorithms and programs include, but are by no means limited to, TBLASTN, BLASTP, FASTA, TFASTA, CLUSTALW, FASTDB (Pearson and Lipman, 1988; Altschul et al., 1990; Thompson et al., 1994; Higgins et al., 1996; Altschul et al., 1990; Altschul et al., 1993; Brutlag et al, 1990), the disclosures of which are incorporated by reference in their entireties.

[0093] In a particularly preferred embodiment, protein and nucleic acid sequence homologies are evaluated using the Basic Local Alignment Search Tool (“BLAST”) which is well known in the art (see, e.g., Karlin and Altschul, 1990; Altschul et al., 1990, 1993, 1997), the disclosures of which are incorporated by reference in their entireties. In particular, five specific BLAST programs are used to perform the following task:

[0094] (1) BLASTP and BLAST3 compare an amino acid query sequence against a protein sequence database;

[0095] (2) BLASTN compares a nucleotide query sequence against a nucleotide sequence database;

[0096] (3) BLASTX compares the six-frame conceptual translation products of a query nucleotide sequence (both strands) against a protein sequence database;

[0097] (4) TBLASTN compares a query protein sequence against a nucleotide sequence database translated in all six reading frames (both strands); and

[0098] (5) TBLASTX compares the six-frame translations of a nucleotide query sequence against the six-frame translations of a nucleotide sequence database.

[0099] The BLAST programs identify homologous sequences by identifying similar segments, which are referred to herein as “high-scoring segment pairs,” between a query amino or nucleic acid sequence and a test sequence which is preferably obtained from a protein or nucleic acid sequence database. High-scoring segment pairs are preferably identified (i.e., aligned) by means of a scoring matrix, many of which are known in the art. Preferably, the scoring matrix used is the BLOSUM62 matrix (Gonnet et al., 1992; Henikoff and Henikoff, 1993, the disclosures of which are incorporated by reference in their entireties). Less preferably, the PAM or PAM250 matrices may also be used (see, e.g., Schwartz and Dayhoff, eds., 1978, the disclosure of which is incorporated by reference in its entirety). The BLAST programs evaluate the statistical significance of all high-scoring segment pairs identified, and preferably selects those segments which satisfy a user-specified threshold of significance, such as a user-specified percent homology. Preferably, the statistical significance of a high-scoring segment pair is evaluated using the statistical significance formula of Karlin (see, e.g., Karlin and Altschul, 1990), the disclosure of which is incorporated by reference in its entirety. The BLAST programs may be used with the default parameters or with modified parameters provided by the user.

[0100] Another preferred method for determining the best overall match between a query nucleotide sequence (a sequence of the present invention) and a subject sequence, also referred to as a global sequence alignment, can be determined using the FASTDB computer program based on the algorithm of Brutlag et al. (1990), the disclosure of which is incorporated by reference in its entirety. In a sequence alignment the query and subject sequences are both DNA sequences. An RNA sequence can be compared by first converting U's to T's. The result of said global sequence alignment is in percent identity. Preferred parameters used in a FASTDB alignment of DNA sequences to calculate percent identity are: Matrix=Unitary, k-tuple=4, Mismatch Penalty=1, Joining Penalty=30, Randomization Group Length=0, Cutoff Score=1, Gap Penalty=5, Gap Size Penalty=0.05, Window Size=500 or the length of the subject nucleotide sequence, whichever is shorter. If the subject sequence is shorter than the query sequence because of 5′ or 3′ deletions, not because of internal deletions, a manual correction must be made to the results. This is because the FASTDB program does not account for 5′ and 3′ truncations of the subject sequence when calculating percent identity. For subject sequences truncated at the 5′ or 3′ ends, relative to the query sequence, the percent identity is corrected by calculating the number of bases of the query sequence that are 5′ and 3′ of the subject sequence, which are not matched/aligned, as a percent of the total bases of the query sequence. Whether a nucleotide is matched/aligned is determined by results of the FASTDB sequence alignment. This percentage is then subtracted from the percent identity, calculated by the above FASTDB program using 10, the specified parameters, to arrive at a final percent identity score. This corrected score is what is used for the purposes of the present invention. Only nucleotides outside the 5′ and 3′ nucleotides of the subject sequence, as displayed by the FASTDB alignment, which are not matched/aligned with the query sequence, are calculated for the purposes of manually adjusting the percent identity score. For example, a 90 nucleotide subject sequence is aligned to a 100 nucleotide query sequence to determine percent identity. The deletions occur at the 5′ end of the subject sequence and therefore, the FASTDB alignment does not show a matched/alignment of the first 10 nucleotides at 5′ end. The 10 unpaired nucleotides represent 10% of the sequence (number of nucleotides at the 5′ and 3′ ends not matched/total number of nucleotides in the query sequence) so 10% is subtracted from the percent identity score calculated by the FASTDB program. If the remaining 90 nucleotides were perfectly matched the final percent identity would be 90%. In another example, a 90 nucleotide subject sequence is compared with a 100 nucleotide query sequence. This time the deletions are internal deletions so that there are no nucleotides on the 5′ or 3′ of the subject sequence which are not matched/aligned with the query. In this case the percent identity calculated by FASTDB is not manually corrected. Once again, only nucleotides 5′ and 3′ of the subject sequence which are not matched/aligned with the query sequence are manually corrected. No other manual corrections are made for the purposes of the present invention.

[0101] Another preferred method for determining the best overall match between a query amino acid sequence (a sequence of the present invention) and a subject sequence, also referred to as a global sequence alignment, can be determined using the FASTDB computer program based on the algorithm of Brutlag et al. (1990). In a sequence alignment the query and subject sequences are both amino acid sequences. The result of said global sequence alignment is in percent identity. Preferred parameters used in a FASTDB amino acid alignment are: Matrix=PAM 0, k-tuple=2, Mismatch Penalty=1, Joining Penalty=20, Randomization Group Length=0, Cutoff Score=1, Window Size=sequence length, Gap Penalty=5, Gap Size Penalty=0.05, Window Size=500 or the length of the subject amino acid sequence, whichever is shorter. If the subject sequence is shorter than the query sequence due to N-or C-terminal deletions, not because of internal deletions, the results, in percent identity, must be manually corrected. This is because the FASTDB program does not account for N- and C-terminal truncations of the subject sequence when calculating global percent identity. For subject sequences truncated at the N- and C-termini, relative to the query sequence, the percent identity is corrected by calculating the number of residues of the query sequence that are N- and C-terminal of the subject sequence, which are not matched/aligned with a corresponding subject residue, as a percent of the total bases of the query sequence. Whether a residue is matched/aligned is determined by results of the FASTDB sequence alignment. This percentage is then subtracted from the percent identity, calculated by the above FASTDB program using the specified parameters, to arrive at a final percent identity score. This final percent identity score is what is used for the purposes of the present invention. Only residues to the N- and C-termini of the subject sequence, which are not matched/aligned with the query sequence, are considered for the purposes of manually adjusting the percent identity score. That is, only query amino acid residues outside the farthest N- and C-terminal residues of the subject sequence. For example, a 90 amino acid residue subject sequence is aligned with a 100-residue query sequence to determine percent identity. The deletion occurs at the N-terminus of the subject sequence and therefore, the FASTDB alignment does not match/align with the first residues at the N-terminus. The 10 unpaired residues represent 10% of the sequence (number of residues at the N- and C-termini not matched/total number of residues in the query sequence) so 10% is subtracted from the percent identity score calculated by the FASTDB program. If the remaining 90 residues were perfectly matched the final percent identity would be 90%. In another example, a 90-residue subject sequence is compared with a 100-residue query sequence. This time the deletions are internal so there are no residues at the N- or C-termini of the subject sequence, which are not matched/aligned with the query. In this case the percent identity calculated by FASTDB is not manually corrected. Once again, only residue positions outside the N- and C-terminal ends of the subject sequence, as displayed in the FASTDB alignment, which are not matched/aligned with the query sequence are manually corrected. No other manual corrections are made for the purposes of the present invention.

[0102] The term “percentage of sequence similarity” refers to comparisons between polypeptide sequences and is determined by comparing two optimally aligned sequences over a comparison window, wherein the portion of the polypeptide sequence in the comparison window may comprise additions or deletions (i.e., gaps) as compared to the reference sequence (which does not comprise additions or deletions) for optimal alignment of the two sequences. The percentage is calculated by determining the number of positions at which an identical or equivalent amino acid residue occurs in both sequences to yield the number of matched positions, dividing the number of matched positions by the total number of positions in the window of comparison and multiplying the result by 100 to yield the percentage of sequence similarity. Similarity is evaluated using any of the variety of sequence comparison algorithms and programs known in the art, including those described above in this section. Equivalent amino acid residues are defined herein in the “Mutated polypeptides” section.

### Polynucleotides of the Invention

[0103] The present invention concerns GENSET genomic and cDNA sequences. The present invention encompasses GENSET genes, polynucleotides comprising GENSET genomic and cDNA sequences, as well as fragments and variants thereof. These polynucleotides may be purified, isolated, or recombinant.

[0104] Also encompassed by the present invention are allelic variants, orthologs, splice variants, and/or species homologues of the GENSET genes. Procedures known in the art can be used to obtain full-length genes and cDNAs, allelic variants, splice variants, full-length coding portions, orthologs, and/or species homologues of genes and cDNAs corresponding to a nucleotide sequence selected from the group consisting of sequences of SEQ ID NOs:1-169, 339-455, 561-784 and sequences of clone inserts of the deposited clone pool, using information from the sequences disclosed herein or the clone pool deposited with the ATCC or other depositary authority. For example, allelic variants, orthologs and/or species homologues may be isolated and identified by making suitable probes or primers from the sequences provided herein and screening a suitable nucleic acid source for allelic variants and/or the desired homologue using any technique known to those skilled in the art including those described into the section entitled “To find similar sequences”.

[0105] In a specific embodiment, the polynucleotides of the invention are at least 15, 30, 50, 100, 125, 500, or 1000 continuous nucleotides. In another embodiment, the polynucleotides are less than or equal to 300 kb, 200 kb, 100 kb, 50 kb, 10 kb, 7.5 kb, 5 kb, 2.5 kb, 2 kb, 1.5 kb, or 1 kb in length. In a further embodiment, polynucleotides of the invention comprise a portion of the coding sequences, as disclosed herein, but do not comprise all or a portion of any intron. In another embodiment, the polynucleotides comprising coding sequences do not contain coding sequences of a genomic flanking gene (i.e., 5′ or 3′ to the gene of interest in the genome). In other embodiments, the polynucleotides of the invention do not contain the coding sequence of more than 1000, 500, 250, 100, 75, 50, 25, 20, 15, 10, 5, 4, 3, 2, or 1 naturally occurring genomic flanking gene(s).

Deposited Clone Pool of the Invention

[0106] Expression of GENSET genes has been shown to lead to the production of at least one mRNA species per GENSET gene, which cDNA sequence is set forth in the appended sequence listing as SEQ ID NOs:1-169, 339-455, 561-784. The cDNAs (SEQ ID NOs:1-169, 339-455, 561-784) corresponding to these GENSET mRNA species were cloned either in the vector pBluescriptII SK⁻ (Stratagene) or in a vector called pPT. Cells containing the cloned cDNAs of the present invention are maintained in permanent deposit by the inventors at Genset, S.A., 24 Rue Royale, 75008 Paris, France. Each cDNA can be removed from the Bluescript vector in which it was inserted by performing a NotI Pst I double digestion, or from the pPT vector by performing a MunI HindIII double digestion, to produce the appropriate fragment for each clone, provided the cDNA sequence does not contain any of the corresponding restriction sites within its sequence. Alternatively, other restriction enzymes of the multicloning site of the vector may be used to recover the desired insert as indicated by the manufacturer.

[0107] Pools of cells containing certain cDNAs of the invention, from which the cells containing a particular polynucleotide is obtainable, have also been deposited with the American Tissue Culture Collection (ATCC), 10801 University Boulevard, Manassas, Va. 20110-2209, United States. These cDNA clones have been transfected into separate bacterial cells (E-coli) for these composite deposits.

[0108] Bacterial cells containing a particular clone can be obtained from the composite deposit as follows:

[0109] An oligonucleotide probe or probes should be designed to the sequence that is known for that particular clone. This sequence can be derived from the sequences provided herein, or from a combination of those sequences. The design of the oligonucleotide probe should preferably follow these parameters:

[0110] (a) It should be designed to an area of the sequence which has the fewest ambiguous bases (“N's”), if any;

[0111] (b) Preferably, the probe is designed to have a Tm of approximately 80 degrees Celsius (assuming 2 degrees for each A or T and 4 degrees for each G or C). However, probes having melting temperatures between 40 degrees Celsius and 80 degrees Celsius may also be used provided that specificity is not lost.

[0112] The oligonucleotide should preferably be labeled with gamma[³²P]ATP (specific activity 6000 Ci/mmole) and T4 polynucleotide kinase using commonly employed techniques for labeling oligonucleotides. Other labeling techniques can also be used. Unincorporated label should preferably be removed by gel filtration chromatography or other established methods. The amount of radioactivity incorporated into the probe should be quantified by measurement in a scintillation counter. Preferably, specific activity of the resulting probe should be approximately 4×10⁶ dpm/pmole.

[0113] The bacterial culture containing the pool of full-length clones should preferably be thawed and 100 ul of the stock used to inoculate a sterile culture flask containing 25 ml of sterile L-broth containing ampicillin at 100 ug/ml. The culture should preferably be grown to saturation at 37 degrees Celsius, and the saturated culture should preferably be diluted in fresh L-broth. Aliquots of these dilutions should preferably be plated to determine the dilution and volume which will yield approximately 5000 distinct and well-separated colonies on solid bacteriological media containing L-broth containing ampicillin at 100 ug/ml and agar at 1.5% in a 150 mm petri dish when grown overnight at 37 degrees Celsius. Other known methods of obtaining distinct, well-separated colonies can also be employed.

[0114] Standard colony hybridization procedures should then be used to transfer the colonies to nitrocellulose filters and lyse, denature and bake them.

[0115] The filter is then preferably incubated at 65 degrees Celsius for 1 hour with gentle agitation in 6×SSC (20× stock is 175.3 g NaCl/liter, 88.2 g Na citrate/liter, adjusted to pH 7.0 with NaOH) containing 0.5% SDS, 100 pg/ml of yeast RNA, and 10 mM EDTA (approximately 10 ml per 150 mm filter). Preferably, the probe is then added to the hybridization mix at a concentration greater than or equal to 1×10⁶ dpm/ml. The filter is then preferably incubated at 65 degrees Celsius with gentle agitation overnight. The filter is then preferably washed in 500 ml of 2×SSC/0.1% SDS at room temperature with gentle shaking for 15 minutes. A third wash with 0.1×SSC/0.5% SDS at 65 degrees Celsius for 30 minutes to 1 hour is optional. The filter is then preferably dried and subjected to autoradiography for sufficient time to visualize the positives on the X-ray film. Other known hybridization methods can also be employed.

[0116] The positive colonies are picked, grown in culture, and plasmid DNA isolated using standard procedures. The clones can then be verified by restriction analysis, hybridization analysis, or DNA sequencing. The plasmid DNA obtained using these procedures may then be manipulated using standard cloning techniques familiar to those skilled in the art.

[0117] Alternatively, to recover cDNA inserts from the pool of bacteria, a PCR can be performed on plasmid DNA isolated using standard procedures and primers designed at both ends of the cDNA insertion, including primers designed in the multicloning site of the vector. If a specific cDNA of interest is to be recovered, primers may be designed in order to be specific for the 5′ end and the 3′ end of this cDNA using sequence information available from the appended sequence listing. The PCR product which corresponds to the cDNA of interest can then be manipulated using standard cloning techniques familiar to those skilled in the art.

[0118] Therefore, an object of the invention is an isolated, purified, or recombinant polynucleotide comprising a nucleotide sequence selected from the group consisting of cDNA inserts of the deposited clone pool. Moreover, preferred polynucleotides of the invention include purified, isolated, or recombinant GENSET cDNAs consisting of, consisting essentially of, or comprising a nucleotide sequence selected from the group consisting of cDNA inserts of the deposited clone pool.

cDNA Sequences of the Invention

[0119] Another object of the invention is a purified, isolated, or recombinant polynucleotide comprising a nucleotide sequence selected from the group consisting of sequences of SEQ ID NOs:1-169, 339-455, 561-784, complementary sequences thereto, and fragments thereof. Moreover, preferred polynucleotides of the invention include purified, isolated, or recombinant GENSET cDNAs consisting of, consisting essentially of, or comprising a sequence selected from the group consisting of SEQ ID NOs:1-169, 339-455, 561-784.

[0120] Accordingly, the coding sequence (CDS) or open reading frame (ORF) of each cDNA of the invention refers to the nucleotide sequence beginning with the first nucleotide of the start codon and ending with the last nucleotide of the stop codon. Similarly, the 5′ untranslated region (or 5′UTR) of each cDNA of the invention refers to the nucleotide sequence starting at nucleotide 1 and ending at the nucleotide immediately 5′ to the first nucleotide of the start codon. The 3′ untranslated region (or 3′UTR) of each cDNA of the invention refers to the nucleotide sequence starting at the nucleotide immediately 3′ to the last nucleotide of the stop codon and ending at the last nucleotide of the cDNA.

Untranslated Regions

[0121] In addition, the invention concerns a purified, isolated, and recombinant nucleic acid comprising a nucleotide sequence selected from the group consisting of the 5′UTRs of sequences of SEQ ID NOs:1-169, 339-455, 561-784 and sequences of clone inserts of the deposited clone pool, sequences complementary thereto, and allelic variants thereof. The invention also concerns a purified, isolated, and/or recombinant nucleic acid comprising a nucleotide sequence selected from the group consisting of the 3′UTRs of sequences of SEQ ID NOs:1-169, 339-455, 561-784 and sequences of clone inserts of the deposited clone pool, sequences complementary thereto, and allelic variants thereof.

[0122] These polynucleotides may be used to detect the presence of GENSET mRNA species in a biological sample using either hybridization or RT-PCR techniques well known to those skilled in the art.

[0123] In addition, these polynucleotides may be used as regulatory molecules able to affect the processing and maturation of any polynucleotide including them (either a GENSET polynucleotide or an heterologous polynucleotide), preferably the localization, stability and/or translation of said polynucleotide including them (for a review on UTRs see Decker and Parker, 1995, Derrigo et al., 2000). In particular, 3′UTRs may be used in order to control the stability of heterologous mRNAs in recombinant vectors using any methods known to those skilled in the art including Makrides ((1999) Protein Expr Purif November 1999; 17(2):183-202), U.S. Pat. Nos. 5,925,564; 5,807,707 and 5,756,264, which disclosures are hereby incorporated by reference in their entireties.

Coding Sequences

[0124] Another object of the invention is an isolated, purified or recombinant polynucleotide comprising the coding sequence of a sequence selected from the group consisting of sequences of SEQ ID NOs:1-169, 339-455, 561-784, clone inserts of the deposited clone pool, and variants thereof.

[0125] A further object of the invention is an isolated, purified or recombinant polynucleotide encoding a polypeptide comprising a sequence selected from the group consisting of sequences of SEQ ID NOs: 170-338, 456-560, 785-918 and allelic variants thereof. Another object of the invention is an isolated, purified or recombinant polynucleotide encoding a polypeptide comprising a sequence selected from the group consisting of polypeptides encoded by cDNA inserts of the deposited clone pool and allelic variants thereof.

[0126] It will be appreciated that should the extent of the coding sequence differ from that indicated in the appended sequence listing as a result of a sequencing error, reverse transcription or amplification error, mRNA splicing, post-translational modification of the encoded protein, enzymatic cleavage of the encoded protein, or other biological factors, one skilled in the art would be readily able to identify the extent of the coding sequences in the sequences of SEQ ID NOs:1-169, 339-455, 561-784. Accordingly, the scope of any claims herein relating to nucleic acids containing the coding sequence of one of SEQ ID NOs:1-169, 339-455, 561-784 is not to be construed as excluding any readily identifiable variations from or equivalents to the coding sequences described in the appended sequence listing. Equivalents includes any alterations in a nucleotide coding sequence that does not result in an amino acid change, or that results in a conservative amino acid substitution, as defined below, in the polypeptide encoded by the nucleotide sequence. Similarly, should the extent of the polypeptides differ from those indicated in the appended sequence listing as a result of any of the preceding factors, the scope of claims relating to polypeptides comprising the amino acid sequence of the polypeptides of SEQ ID NOs:170-338, 456-560, 785-918 is not to be construed as excluding any readily identifiable variations from or equivalents to the sequences described in the appended sequence listing.

[0127] The above-disclosed polynucleotides that contain the coding sequence of the GENSET genes may be expressed in a desired host cell or a desired host organism, when this polynucleotide is placed under the control of suitable expression signals. The expression signals may be either the expression signals contained in the regulatory regions in the GENSET genes of the invention or, in contrast, the signals may be exogenous regulatory nucleic sequences. Such a polynucleotide, when placed under the suitable expression signals, may also be inserted in a vector for its expression and/or amplification.

[0128] Further included in the present invention are polynucleotides encoding the polypeptides of the present invention that are fused in frame to the coding sequences for additional heterologous amino acid sequences. Also included in the present invention are nucleic acids encoding polypeptides of the present invention together with additional, non-coding sequences, including, but not limited to, non-coding 5′ and 3′ sequences, vector sequence, sequences used for purification, probing, or priming. For example, heterologous sequences include transcribed, untranslated sequences that may play a role in transcription and mRNA processing, such as ribosome binding and stability of mRNA. The heterologous sequences may alternatively comprise additional coding sequences that provide additional functionalities. Thus, a nucleotide sequence encoding a polypeptide may be fused to a tag sequence, such as a sequence encoding a peptide that facilitates purification or detection of the fused polypeptide. In certain preferred embodiments of this aspect of the invention, the tag amino acid sequence is a hexa-histidine peptide, such as the tag provided in a pQE vector (QIAGEN), or in any of a number of additional, commercially available vectors. For instance, hexa-histidine provides for the convenient purification of the fusion protein (see, Gentz et al., 1989, Proc Natl Acad Sci USA Feb;86(3):821-4, the disclosure of which is incorporated by reference in its entirety). The “HA” tag is another peptide useful for purification which corresponds to an epitope derived from the influenza hemagglutinin protein (see, Wilson et al., 1984, Cell Jul;37(3):767-78, the disclosure of which is incorporated by reference in its entirety). As discussed below, other such fusion proteins include a GENSET polypeptide fused to Fc at the N- or C-terminus.

[0129] Suitable recombinant vectors that contain a polynucleotide such as described herein are disclosed elsewhere in the specification. Expression vectors encoding GENSET polypeptides or fragments thereof are described in the section entitled “Preparation of the polypeptides”.

Regulatory Sequences of the Invention

[0130] As mentioned, the genomic sequence of GENSET genes contain regulatory sequences in the non-coding 5′-flanking region and possibly in the non-coding 3′-flanking region that border the GENSET polypeptide coding regions containing the exons of these genes.

[0131] Polynucleotides derived from GENSET polynucleotide 5′ and 3′ regulatory regions are useful in order to detect the presence of at least a copy of a genomic nucleotide sequence of the GENSET gene or a fragment thereof in a test sample.

Preferred Regulatory Sequences

[0132] Polynucleotides carrying the regulatory elements located at the 5′ end and at the 3′ end of GENSET polypeptide coding regions may be advantageously used to control, e.g., the transcriptional and translational activity of a heterologous polynucleotide of interest.

[0133] Thus, the present invention also concerns a purified or isolated nucleic acid comprising a polynucleotide which is selected from the group consisting of the 5′ and 3′ GENSET polynucleotide regulatory regions, sequences complementary thereto, regulatory active fragments and variants thereof. The invention also pertains to a purified or isolated nucleic acid comprising a polynucleotide having at least 95% nucleotide identity with a polynucleotide selected from the group consisting of GENSET polynucleotide 5′ and 3′ regulatory regions, advantageously 99% nucleotide identity, preferably 99.5% nucleotide identity and most preferably 99.8% nucleotide identity with a polynucleotide selected from the group consisting of GENSET polynucleotide 5′ and 3′ regulatory regions, sequences complementary thereto, variants and regulatory active fragments thereof.

[0134] Another object of the invention consists of purified, isolated or recombinant nucleic acids comprising a polynucleotide that hybridizes, under the stringent hybridization conditions defined herein, with a polynucleotide selected from the group consisting of the nucleotide sequences of GENSET polynucleotide 5′ and 3′ regulatory regions, sequences complementary thereto, variants and regulatory active fragments thereof.

[0135] Preferred fragments of 5′ regulatory regions have a length of about 1500 or 1000 nucleotides, preferably of about 500 nucleotides, more preferably about 400 nucleotides, even more preferably 300 nucleotides and most preferably about 200 nucleotides.

[0136] Preferred fragments of 3′ regulatory regions are at least 20, 50, 100, 150, 200, 300 or 400 bases in length. “Regulatory active” polynucleotide derivatives of the 5′ or 3′ regulatory region are polynucleotides comprising or alternatively consisting of a fragment of said polynucleotide which is functional as a regulatory region for expressing a recombinant polypeptide or a recombinant polynucleotide in a recombinant cell host. It could act either as an enhancer or as a repressor. For the purpose of the invention, a nucleic acid or polynucleotide is “functional” as a regulatory region for expressing a recombinant polypeptide or a recombinant polynucleotide if said regulatory polynucleotide contains nucleotide sequences which contain transcriptional and translational regulatory information, and such sequences are “operably linked” to nucleotide sequences which encode the desired polypeptide or the desired polynucleotide.

[0137] The regulatory polynucleotides of the invention may be prepared from the nucleotide sequence of GENSET genomic or cDNA sequence, for example, by cleavage using suitable restriction enzymes, or by PCR. The regulatory polynucleotides may also be prepared by digestion of a GENSET gene-containing genomic clone by an exonuclease enzyme, such as Bal31 (Wabiko et al., DNA 5(4):305-14 (1986), the disclosure of which is incorporated by reference in its entirety). These regulatory polynucleotides can also be prepared by nucleic acid chemical synthesis, as described elsewhere in the specification.

[0138] The regulatory polynucleotides according to the invention may be part of a recombinant expression vector that may be used to express a coding sequence in a desired host cell or host organism. The recombinant expression vectors according to the invention are described elsewhere in the specification.

[0139] Preferred 5′-regulatory polynucleotides of the invention include 5′-UTRs of GENSET cDNAs, or regulatory active fragments or variants thereof. More preferred 5′-regulatory polynucleotides of the invention include sequences selected from the group consisting of 5′-UTRs of sequences of SEQ ID NOs:1-169, 339-455, 561-784, 5′-UTRs of clone inserts of the deposited clone pool, regulatory active fragments and variants thereof.

[0140] Preferred 3′-regulatory polynucleotide of the invention include 3′-UTRs of GENSET cDNAs, or regulatory active fragments or variants thereof. More preferred 3′-regulatory polynucleotides of the invention include sequences selected from the group consisting of 3′-UTRs of sequences of SEQ ID NOs:1-169, 339-455, 561-784, 3′-UTRs of clone inserts of the deposited clone pool, regulatory active fragments and variants thereof.

[0141] A further object of the invention consists of a purified or isolated nucleic acid comprising:

[0142] a) a polynucleotide comprising a 5′ regulatory nucleotide sequence selected from the group consisting of:

[0143] (i) a nucleotide sequence comprising a polynucleotide of a GENSET polynucleotide 5′ regulatory region or a complementary sequence thereto;

[0144] (ii) a nucleotide sequence comprising a polynucleotide having at least 95% of nucleotide identity with the nucleotide sequence of a GENSET polynucleotide 5′ regulatory region or a complementary sequence thereto;

[0145] (iii) a nucleotide sequence comprising a polynucleotide that hybridizes under stringent hybridization conditions with the nucleotide sequence of a GENSET polynucleotide 5′ regulatory region or a complementary sequence thereto; and

[0146] (iv) a regulatory active fragment or variant of the polynucleotides in (i), (ii) and (iii);

[0147] b) a nucleic acid molecule encoding a desired polypeptide or a nucleic acid molecule of interest, wherein said nucleic acid molecule is operably linked to the polynucleotide defined in (a); and

[0148] c) optionally, a polynucleotide comprising a 3′-regulatory polynucleotide, preferably a 3′-regulatory polynucleotide of a GENSET gene.

[0149] In a specific embodiment, the nucleic acid defined above includes the 5′-UTR of a GENSET cDNA, or a regulatory active fragment or variant thereof.

[0150] In a second specific embodiment, the nucleic acid defined above includes the 3′-UTR of a GENSET cDNA, or a regulatory active fragment or variant thereof.

[0151] The regulatory polynucleotide of the 5′ regulatory region, or its regulatory active fragments or variants, is operably linked at the 5′-end of the nucleic acid molecule encoding the desired polypeptide or nucleic acid molecule of interest.

[0152] The regulatory polynucleotide of the 3′ regulatory region, or its regulatory active fragments or variants, is advantageously operably linked at the 3′-end of the nucleic acid molecule encoding the desired polypeptide or nucleic acid molecule of interest.

[0153] The desired polypeptide encoded by the above-described nucleic acid may be of various nature or origin, encompassing proteins of prokaryotic viral or eukaryotic origin. Among the polypeptides expressed under the control of a GENSET polynucleotide regulatory region include bacterial, fungal or viral antigens. Also encompassed are eukaryotic proteins such as intracellular proteins, such as “house-keeping” proteins, membrane-bound proteins, such as mitochondrial membrane-bound proteins and cell surface receptors, and secreted proteins such as endogenous mediators such as cytokines. The desired polypeptide may be an heterologous polypeptide or a GENSET polypeptide, especially a protein with an amino acid sequence selected from the group consisting of sequences of SEQ ID NOs:170-338, 456-560, 785-918, fragments and variants thereof.

[0154] The desired nucleic acids encoded by the above-described polynucleotides, usually an RNA molecule, may be complementary to a desired coding polynucleotide, for example to a GENSET coding sequence, and thus useful as an antisense polynucleotide. Such a polynucleotide may be included in a recombinant expression vector in order to express the desired polypeptide or the desired nucleic acid in host cell or in a host organism. Suitable recombinant vectors that contain a polynucleotide such as described herein are disclosed elsewhere in the specification.

Polynucleotide Variants

[0155] The invention also relates to variants of the polynucleotides described herein and fragments thereof. “Variants” of polynucleotides, as the term is used herein, are polynucleotides that differ from a reference polynucleotide. Generally, differences are limited so that the nucleotide sequences of the reference and the variant are closely similar overall and, in many regions, identical. The present invention encompasses both allelic variants and degenerate variants.

[0156] Examples of variant sequences of polynucleotides of the invention are given in the appended sequence listing. Specifically, Table I includes sequences for which a plurality of closely related sequences, e.g. variants, are provided.

Allelic Variants

[0157] A variant of a polynucleotide may be a naturally occurring variant such as a naturally occurring allelic variant, or it may be a variant that is not known to occur naturally. By an “allelic variant” is intended one of several alternate forms of a gene occupying a given locus on a chromosome of an organism (see Lewin, 1990), the disclosure of which is incorporated by reference in its entirety. Diploid organisms may be homozygous or heterozygous for an allelic form. Non-naturally occurring variants of the polynucleotide may be made by art-known mutagenesis techniques, including those applied to polynucleotides, cells or organisms. See, for example, Table I, which includes sequences for which a plurality of closely related sequences, e.g. allelic variants of a single gene, are provided.

Degenerate Variant

[0158] In addition to the isolated polynucleotides of the present invention, and fragments thereof, the invention further includes polynucleotides which comprise a sequence substantially different from those described above but which, due to the degeneracy of the genetic code, still encode a GENSET polypeptide of the present invention. These polynucleotide variants are referred to as “degenerate variants” throughout the instant application. That is, all possible polynucleotide sequences that encode the GENSET polypeptides of the present invention are contemplated. This includes the genetic code and species-specific codon preferences known in the art. Thus, it would be routine for one skilled in the art to generate the degenerate variants described above, for instance, to optimize codon expression for a particular host (e.g., change codons in the human mRNA to those preferred by other mammalian or bacterial host cells).

[0159] Nucleotide changes present in a variant polynucleotide may be silent, which means that they do not alter the amino acids encoded by the polynucleotide. However, nucleotide changes may also result in amino acid substitutions, additions, deletions, fusions and truncations in the polypeptide encoded by the reference sequence. The substitutions, deletions or additions may involve one or more nucleotides. The variants may be altered in coding or non-coding regions or both. Alterations in the coding regions may produce conservative or non-conservative amino acid substitutions, deletions or additions. In the context of the present invention, preferred embodiments are those in which the polynucleotide variants encode polypeptides which retain substantially the same biological properties or activities as the GENSET protein. More preferred polynucleotide variants are those containing conservative substitutions.

Similar Polynucleotides

[0160] Other embodiments of the present invention provide a purified, isolated or recombinant polynucleotide which is at least 80%, 85%, 90%, 95%, 96%, 97%, 98% or 99% identical to a polynucleotide selected from the group consisting of sequences of SEQ ID NOs:1-169, 339-455, 561-784 and the clone inserts of the deposited clone pool. The above polynucleotides are included regardless of whether they encode a polypeptide having a GENSET biological activity. This is because even where a particular nucleic acid molecule does not encode a polypeptide having activity, one of skill in the art would still know how to use the nucleic acid molecule, for instance, as a hybridization probe or primer. Uses of the nucleic acid molecules of the present invention that do not encode a polypeptide having GENSET activity include, inter alia, isolating a GENSET gene or allelic variants thereof from a DNA library, and detecting GENSET mRNA expression in biological samples suspected of containing GENSET mRNA or DNA, e.g., by Northern Blot or PCR analysis.

[0161] The present invention is further directed to polynucleotides having sequences at least 50%. 60%, 70%, 80%, 90%, 95%, 96%, 97%, 98% or 99% identity to a polynucleotide selected from the group consisting of sequences of SEQ ID NOs:1-169, 339-455, 561-784 and clone inserts of the deposited clone pool, where said polynucleotide do, in fact, encode a polypeptide having a GENSET biological activity. Of course, due to the degeneracy of the genetic code, one of ordinary skill in the art will immediately recognize that a large number of the polynucleotides at least 50%. 60%, 70%, 80%, 90%, 95%, 96%, 97%, 98%, or 99% identical to a polynucleotide selected from the group consisting of sequences of SEQ ID NOs:1-169, 339-455, 561-784 and clone inserts of the deposited clone pool will encode a polypeptide having biological activity. In fact, since degenerate variants of these nucleotide sequences all encode the same polypeptide, this will be clear to the skilled artisan even without performing the above described comparison assay. It will be further recognized in the art that, for such nucleic acid molecules that are not degenerate variants, a reasonable number will also encode a polypeptide having biological activity. This is because the skilled artisan is fully aware of amino acid substitutions that are either less likely or not likely to significantly affect protein function (e.g., replacing one aliphatic amino acid with a second aliphatic amino acid), as further described below. By a polynucleotide having a nucleotide sequence at least, for example, 95% “identical” to a reference nucleotide sequence of the present invention, it is intended that the nucleotide sequence of the polynucleotide is identical to the reference sequence except that the polynucleotide sequence may include up to five point mutations per each 100 nucleotides of the reference nucleotide sequence encoding the GENSET polypeptide. In other words, to obtain a polynucleotide having a nucleotide sequence at least 95% identical to a reference nucleotide sequence, up to 5% of the nucleotides in the reference sequence may be deleted, inserted, or substituted with another nucleotide. The query sequence may be an entire sequence selected from the group consisting of sequences of SEQ ID NOs:1-169, 339-455, 561-784 and sequences of clone inserts of the deposited clone pool, or the ORF (open reading frame) of a polynucleotide sequence selected from said group, or any fragment specified as described herein.

Hybridizing Polynucleotides

[0162] In another aspect, the invention provides an isolated or purified nucleic acid molecule comprising a polynucleotide which hybridizes under stringent hybridization conditions to any polynucleotide of the present invention using any methods known to those skilled in the art including those disclosed herein and in particular in the “To find similar sequences” section. Also contemplated are nucleic acid molecules that hybridize to the polynucleotides of the present invention at lower stringency hybridization conditions, preferably at moderate or low stringency conditions as defined herein. Such hybridizing polynucleotides may be of at least 15, 18, 20, 23, 25, 28, 30, 35, 40, 50, 75, 100, 200, 300, 500 or 1000 nucleotides in length.

[0163] Of particular interest are polynucleotides hybridizing to any polynucleotide of the invention and encoding GENSET polypeptides, particularly GENSET polypeptides exhibiting a GENSET biological activity.

[0164] Of course, a polynucleotide which hybridizes only to polyA+ sequences (such as any 3′ terminal polyA+ tract of a cDNA shown in the sequence listing), or to a 5′ complementary stretch of T (or U) residues, would not be included in the definition of “polynucleotide,” since such a polynucleotide would hybridize to any nucleic acid molecule containing a poly(A) stretch or the complement thereof (e.g., practically any double-stranded cDNA clone generated using oligo dT as a primer).

Complementary Polynucleotides

[0165] The invention further provides isolated nucleic acid molecules having a nucleotide sequence fully complementary to any polynucleotide of the invention. The present invention encompasses a purified, isolated or recombinant polynucleotide having a nucleotide sequence complementary to a sequence selected from the group consisting of sequences of SEQ ID NOs:1-169, 339-455, 561-784, sequences of clone inserts of the deposited clone pool and fragments thereof. Such isolated molecules, particularly DNA molecules, are useful as probes for gene mapping and for identifying GENSET mRNA in a biological sample, for instance, by PCR or Northern blot analysis.

Polynucleotide Fragments

[0166] The present invention is further directed to polynucleotides encoding portions or fragments of the nucleotide -sequences described herein. Uses for the polynucleotide fragments of the present invention include probes, primers, molecular weight markers and for expressing the polypeptide fragments of the present invention. Fragments include portions of polynucleotides selected from the group consisting of a) the sequences of SEQ ID NOs:1-169, 339-455, 561-784, b) genomic GENSET sequences, c) the polynucleotides encoding a polypeptide selected from the group consisting of the sequences of SEQ ID NOs:170-338, 456-560, 785-918, d) the sequences of clone inserts of the deposited clone pool, and e) the polynucleotides encoding the polypeptides encoded by the clone inserts of the deposited clone pool. Particularly included in the present invention is a purified or isolated polynucleotide comprising at least 8 consecutive bases of a polynucleotide of the present invention. In one aspect of this embodiment, the polynucleotide comprises at least 10, 12, 15, 18, 20, 25, 28, 30, 35, 40, 50, 75, 100, 150, 200, 300, 400, 500, 800, 1000, 1500, or 2000 consecutive nucleotides of a polynucleotide of the present invention.

[0167] In addition to the above preferred polynucleotide sizes, further preferred sub-genuses of polynucleotides comprise at least 8 nucleotides, wherein “at least 8” is defined as any integer between 8 and the integer representing the 3′ most nucleotide position as set forth in the sequence listing or elsewhere herein. Further included as preferred polynucleotides of the present invention are polynucleotide fragments at least 8 nucleotides in length, as described above, that are further specified in terms of their 5′ and 3′ position. The 5′ and 3′ positions are represented by the position numbers set forth in the appended sequence listing. For allelic, degenerate and other variants, position 1 is defined as the 5′ most nucleotide of the ORF, i.e., the nucleotide “A” of the start codon with the remaining nucleotides numbered consecutively. Therefore, every combination of a 5′ and 3′ nucleotide position that a polynucleotide fragment of the present invention, at least 8 contiguous nucleotides in length, could occupy on a polynucleotide of the invention is included in the invention as an individual species. The polynucleotide fragments specified by 5′ and 3′ positions can be immediately envisaged and are therefore not individually listed solely for the purpose of not unnecessarily lengthening the specification.

[0168] It is noted that the above species of polynucleotide fragments of the present invention may alternatively be described by the formula “a to b”; where “a” equals the 5′ most nucleotide position and “b” equals the 3′ most nucleotide position of the polynucleotide; and further where “a” equals an integer between 1 and the number of nucleotides of the polynucleotide sequence of the present invention minus 8, and where “b” equals an integer between 9 and the number of nucleotides of the polynucleotide sequence of the present invention; and where “a” is an integer smaller then “b” by at least 8.

[0169] Therefore, the present invention encompasses isolated, purified, or recombinant polynucleotides which consist of, consist essentially of, or comprise a contiguous span of at least 8, 10, 12, 15, 18, 20, 25, 28, 30, 35, 40, 50, 75, 100, 150, 200, 300, 400, 500, 1000 or 2000 nucleotides of a sequence selected from the group consisting of the sequences of SEQ ID NOs:1-169, 339-455, 561-784 and sequences fully complementary thereto.

[0170] Other preferred fragments of the invention are polynucleotides comprising polynucleotides encoding domains of polypeptides. Such fragments may be used to obtain other polynucleotides encoding polypeptides having similar domains using hybridization or RT-PCR techniques. Alternatively, these fragments may be used to express a polypeptide domain which may have a specific biological property. Thus, another object of the invention is an isolated, purified or recombinant polynucleotide encoding a polypeptide consisting of, consisting essentially of, or comprising a contiguous span of at least 5, 6, 8, 10, 12, 15, 20, 25, 30, 35, 40, 50, 60, 75, 100, 150 or 200 consecutive amino acids of a sequence selected from the group consisting of the sequences of SEQ ID NOs: 170-338, 456-560, 785-918, to the extent that a contiguous span of these lengths is consistent with the lengths of said selected sequence, where said contiguous span comprises at least 1, 2, 3, 5, or 10 of the amino acid positions of a domain of said selected sequence. The present invention also encompasses isolated, purified or recombinant polynucleotides encoding a polypeptide comprising a contiguous span of at least 5, 6, 8, 10, 12, 15, 20, 25, 30, 35, 40, 50, 60, 75, 100, 150 or 200 consecutive amino acids of a sequence selected from the group consisting of sequences of SEQ ID NOs: 170-338, 456-560, 785-918, to the extent that a contiguous span of these lengths is consistent with the lengths of said selected sequence, where said contiguous span is a domain of said selected sequence. The present invention also encompasses isolated, purified or recombinant polynucleotides encoding a polypeptide comprising a domain of a sequence selected from the group consisting of the sequences of SEQ ID NOs:170-338, 456-560, 785-918.

[0171] The present invention further encompasses any combination of the polynucleotide fragments listed in this section.

Oligonucleotide Primers and Probes

[0172] The present invention also encompasses fragments of GENSET polynucleotides for use as primers and probes. Polynucleotides derived from the GENSET genomic and cDNA sequences are useful in order to detect the presence of at least a copy of a GENSET polynucleotide or fragment, complement, or variant thereof in a test sample.

Structural Definition

[0173] Any polynucleotide of the invention may be used as a primer or probe. Particularly preferred probes and primers of the invention include isolated, purified, or recombinant polynucleotides comprising a contiguous span of at least 12, 15, 18, 20, 25, 30, 35, 40, 50, 60, 70, 80, 90, 100, 150, 200, 500, or 1000 nucleotides of a sequence selected from the group consisting of the GENSET genomic sequences, the cDNA sequences and the sequences fully complementary thereto. Another object of the invention is a purified, isolated, or recombinant polynucleotide comprising the nucleotide sequence of a sequence selected from the group consisting of the sequences of SEQ ID NOs:1-169, 339-455, 561-784, sequences of clone inserts of the deposited clone pool, sequences fully complementary thereto, allelic variants thereof, and fragments thereof. Moreover, preferred probes and primers of the invention include purified, isolated, or recombinant GENSET cDNAs consisting of, consisting essentially of, or comprising the sequences of SEQ ID NOs:1-169, 339-455, 561-784 and sequences of clone inserts of the deposited clone pool. Particularly preferred probes and primers of the invention include isolated, purified, or recombinant polynucleotides comprising a contiguous span of at least 12, 15, 18, 20, 25, 30, 35, 40, 50, 60, 70, 80, 90, 100, 150, 200, 500, or 1000 nucleotides of a sequence selected from the group consisting of the sequences of SEQ ID NOs:1-169, 339-455, 561-784 and the sequences fully complementary thereto.

Design of Primers and Probes

[0174] A probe or a primer according to the invention has between 8 and 1000 nucleotides in length, or is specified to be at least 12, 15, 18, 20, 25, 35, 40, 50, 60, 70, 80, 100, 250, 500 or 1000 nucleotides in length. More particularly, the length of these probes and primers can range from 8, 10, 15, 20, or 30 to 100 nucleotides, preferably from 10 to 50, more preferably from 15 to 30 nucleotides. Shorter probes and primers tend to lack specificity for a target nucleic acid sequence and generally require cooler temperatures to form sufficiently stable hybrid complexes with the template. Longer probes and primers are expensive to produce and can sometimes self-hybridize to form hairpin structures. The appropriate length for primers and probes under a particular set of assay conditions may be empirically determined by one of skill in the art. The formation of stable hybrids depends on the melting temperature (Tm) of the DNA. The Tm depends on the length of the primer or probe, the ionic strength of the solution and the G+C content. The higher the G+C content of the primer or probe, the higher is the melting temperature because G:C pairs are held by three H bonds whereas A:T pairs have only two. The GC content in the probes of the invention usually ranges between 10 and 75%, preferably between 35 and 60%, and more preferably between 40 and 55%.

[0175] For amplification purposes, pairs of primers with approximately the same Tm are preferable. Primers may be designed using the OSP software (Hillier and Green, 1991), the disclosure of which is incorporated by reference in its entirety, based on GC content and melting temperatures of oligonucleotides, or using PC-Rare (http:// bioinformatics.weizmann.ac.il/software/PC-Rare/doc/manuel.html) based on the octamer frequency disparity method (Griffais et al., 1991), the disclosure of which is incorporated by reference in its entirety. DNA amplification techniques are well known to those skilled in the art. Amplification techniques that can be used in the context of the present invention include, but are not limited to, the ligase chain reaction (LCR) described in EP-A-320 308, WO 9320227 and EP-A-439 182, the polymerase chain reaction (PCR, RT-PCR) and techniques such as the nucleic acid sequence based amplification (NASBA) described in Guatelli et al.(1990) and in Compton (1991), Q-beta amplification as described in European Patent Application No 4544610, strand displacement amplification as described in Walker et al. (1996) and EP A 684 315 and, target mediated amplification as described in PCT Publication WO 9322461, the disclosures of which are incorporated by reference in their entireties.

[0176] LCR and Gap LCR are exponential amplification techniques, both depending on DNA ligase to join adjacent primers annealed to a DNA molecule. In Ligase Chain Reaction (LCR), probe pairs are used which include two primary (first and second) and two secondary (third and fourth) probes, all of which are employed in molar excess to target. The first probe hybridizes to a first segment of the target strand and the second probe hybridizes to a second segment of the target strand, the first and second segments being contiguous so that the primary probes abut one another in 5′ phosphate-3′hydroxyl relationship, and so that a ligase can covalently fuse or ligate the two probes into a fused product. In addition, a third (secondary) probe can hybridize to a portion of the first probe and a fourth (secondary) probe can hybridize to a portion of the second probe in a similar abutting fashion. Of course, if the target is initially double stranded, the secondary probes also will hybridize to the target complement in the first instance. Once the ligated strand of primary probes is separated from the target strand, it will hybridize with the third and fourth probes, which can be ligated to form a complementary, secondary ligated product. It is important to realize that the ligated products are functionally equivalent to either the target or its complement. By repeated cycles of hybridization and ligation, amplification of the target sequence is achieved. A method for multiplex LCR has also been described (WO 9320227), the disclosure of which is incorporated by reference in its entirety. Gap LCR (GLCR) is a version of LCR where the probes are not adjacent but are separated by 2 to 3 bases.

[0177] For amplification of mRNAs, it is within the scope of the present invention to reverse transcribe mRNA into cDNA followed by polymerase chain reaction (RT-PCR); or, to use a single enzyme for both steps as described in U.S. Pat. No. 5,322,770 or, to use Asymmetric Gap LCR (RT-AGLCR) as described by Marshall et al.(1994), the disclosures of which are incorporated by reference in its entireties. AGLCR is a modification of GLCR that allows the amplification of RNA.

[0178] PCR technology is the preferred amplification technique used in the present invention. A variety of PCR techniques are familiar to those skilled in the art. For a review of PCR technology, see White (1997), Erlich (1992) and the publication entitled “PCR Methods and Applications” ((1991) Cold Spring Harbor Laboratory Press), the disclosures of which are incorporated by reference in their entireties. In each of these PCR procedures, PCR primers on either side of the nucleic acid sequences to be amplified are added to a suitably prepared nucleic acid sample along with dNTPs and a thermostable polymerase such as Taq polymerase, Pfu polymerase, Tth polymerase or Vent polymerase. The nucleic acid in the sample is denatured and the PCR primers are specifically hybridized to complementary nucleic acid sequences in the sample. The hybridized primers are extended. Thereafter, another cycle of denaturation, hybridization, and extension is initiated. The cycles are repeated multiple times to produce an amplified fragment containing the nucleic acid sequence between the primer sites. PCR has further been described in several patents including U.S. Pat. Nos. 4,683,195; 4,683,202; and 4,965,188, the disclosures of which are incorporated herein by reference in their entireties.

Preparation of Primers and Probes

[0179] Primers and probes can be prepared by any suitable method, including, for example, cloning and restriction of appropriate sequences and direct chemical synthesis by a method such as the phosphodiester method of Narang et al.(1979), the phosphodiester method of Brown et al.(1979), the diethylphosphoramidite method of Beaucage et al.(1981) and the solid support method described in EP 0 707 592, which disclosures are hereby incorporated by reference in their entireties.

[0180] Detection probes are generally nucleic acid sequences or uncharged nucleic acid analogs such as, for example peptide nucleic acids which are disclosed in International Patent Application WO 92/20702, morpholino analogs which are described in U.S. Pat. Nos. 5,185,444; 5,034,506 and 5,142,047, which disclosures are hereby incorporated by reference in their entireties. The probe may have to be rendered “non-extendable” in that additional dNTPs cannot be added to the probe. In and of themselves analogs usually are non-extendable and nucleic acid probes can be rendered non-extendable by modifying the 3′ end of the probe such that the hydroxyl group is no longer capable of participating in elongation. For example, the 3′ end of the probe can be functionalized with the capture or detection label to thereby consume or otherwise block the hydroxyl group. Alternatively, the 3′ hydroxyl group simply can be cleaved, replaced or modified, U.S. patent application Ser. No. 07/049,061 filed Apr. 19, 1993, which disclosure is hereby incorporated by reference in its entirety, describes modifications, which can be used to render a probe non-extendable. Labeling of Probes

[0181] Any of the polynucleotides of the present invention can be labeled, if desired, by incorporating any label known in the art to be detectable by spectroscopic, photochemical, biochemical, immunochemical, or chemical means. For example, useful labels include radioactive substances (including, ³²P, ³⁵S, ³H, ¹²⁵I), fluorescent dyes (including, 5-bromodesoxyuridin, fluorescein, acetylaminofluorene, digoxigenin) or biotin. Preferably, polynucleotides are labeled at their 3′ and 5′ ends. Examples of non-radioactive labeling of nucleic acid fragments are described in the French patent No. FR-7810975 or by Urdea et al (1988) or Sanchez-Pescador et al (1988), which disclosures are hereby incorporated by reference in their entireties. In addition, the probes according to the present invention may have structural characteristics such that they allow the signal amplification, such structural characteristics being, for example, branched DNA probes as those described by Urdea et al. in 1991 or in the European patent No. EP 0 225 807 (Chiron), which disclosures are hereby incorporated by reference in their entireties.

[0182] The detectable probe may be single stranded or double stranded and may be made using techniques known in the art, including in vitro transcription, nick translation, or kinase reactions. A nucleic acid sample containing a sequence capable of hybridizing to the labeled probe is contacted with the labeled probe. If the nucleic acid in the sample is double stranded, it may be denatured prior to contacting the probe. In some applications, the nucleic acid sample may be immobilized on a surface such as a nitrocellulose or nylon membrane. The nucleic acid sample may comprise nucleic acids obtained from a variety of sources, including genomic DNA, cDNA libraries, RNA, or tissue samples.

[0183] Procedures used to detect the presence of nucleic acids capable of hybridizing to the detectable probe include well known techniques such as Southern blotting, Northern blotting, dot blotting, colony hybridization, and plaque hybridization. In some applications, the nucleic acid capable of hybridizing to the labeled probe may be cloned into vectors such as expression vectors, sequencing vectors, or in vitro transcription vectors to facilitate the characterization and expression of the hybridizing nucleic acids in the sample. For example, such techniques may be used to isolate and clone sequences in a genomic library or cDNA library which are capable of hybridizing to the detectable probe as described herein.

Immobilization of Probes

[0184] A label can also be used to capture the primer, so as to facilitate the immobilization of either the primer or a primer extension product, such as amplified DNA, on a solid support. A capture label is attached to the primers or probes and can be a specific binding member which forms a binding pair with the solid phase reagent's specific binding member (e.g. biotin and streptavidin). Therefore depending upon the type of label carried by a polynucleotide or a probe, it may be employed to capture or to detect the target DNA. Further, it will be understood that the polynucleotides, primers or probes provided herein, may, themselves, serve as the capture label. For example, in the case where a solid phase reagent's binding member is a nucleic acid sequence, it may be selected such that it binds a complementary portion of a primer or probe to thereby immobilize the primer or probe to the solid phase. In cases where a polynucleotide probe itself serves as the binding member, those skilled in the art will recognize that the probe will contain a sequence or “tail” that is not complementary to the target. In the case where a polynucleotide primer itself serves as the capture label, at least a portion of the primer will be free to hybridize with a nucleic acid on a solid phase. DNA Labeling techniques are well known to the skilled technician.

[0185] The probes of the present invention are useful for a number of purposes. They can notably be used in Southern hybridization to genomic DNA. The probes can also be used to detect PCR amplification products. They may also be used to detect mismatches in the GENSET gene or mRNA using other techniques. They may also be used for in situ hybridization.

[0186] Any of the polynucleotides, primers and probes of the present invention can be conveniently immobilized on a solid support. The solid support is not critical and can be selected by one skilled in the art. Thus, latex particles, microparticles, magnetic beads, non-magnetic beads (including polystyrene beads), membranes (including nitrocellulose strips), plastic tubes, walls of microtiter wells, glass or silicon chips, sheep (or other suitable animal's) red blood cells and duracytes are all suitable examples. Suitable methods for immobilizing nucleic acids on solid phases include ionic, hydrophobic, covalent interactions and the like. A solid support, as used herein, refers to any material which is insoluble, or can be made insoluble by a subsequent reaction. The solid support can be chosen for its intrinsic ability to attract and immobilize the capture reagent. Alternatively, the solid phase can retain an additional receptor which has the ability to attract and immobilize the capture reagent. The additional receptor can include a charged substance that is oppositely charged with respect to the capture reagent itself or to a charged substance conjugated to the capture reagent. As yet another alternative, the receptor molecule can be any specific binding member which is immobilized upon (attached to) the solid support and which has the ability to immobilize the capture reagent through a specific binding reaction. The receptor molecule enables the indirect binding of the capture reagent to a solid support material before the performance of the assay or during the performance of the assay. The solid phase thus can be a plastic, derivatized plastic, magnetic or non-magnetic metal, glass or silicon surface of a test tube, microtiter well, sheet, bead, microparticle, chip, sheep (or other suitable animal's) red blood cells, duracytes® and other configurations known to those of ordinary skill in the art. The polynucleotides of the invention can be attached to or immobilized on a solid support individually or in groups of at least 2, 5, 8, 10, 12, 15, 20, or 25 distinct polynucleotides of the invention to a single solid support. In addition, polynucleotides other than those of the invention may be attached to the same solid support as one or more polynucleotides of the invention.

Oligonucleotide Array

[0187] A substrate comprising a plurality of oligonucleotide primers or probes of the invention may be used either for detecting or amplifying targeted sequences in GENSET genes, may be used for detecting mutations in the coding or in the non-coding sequences of GENSET genes, and may also be used to determine GENSET gene expression in different contexts such as in different tissues, at different stages of a process (embryo development, disease treatment), and in patients versus healthy individuals as described elsewhere in the application.

[0188] As used herein, the term “array” means a one dimensional, two dimensional, or multidimensional arrangement of nucleic acids of sufficient length to permit specific detection of gene expression. For example, the array may contain a plurality of nucleic acids derived from genes whose expression levels are to be assessed. The array may include a GENSET genomic DNA, a GENSET cDNA, sequences complementary thereto or fragments thereof. Preferably, the fragments are at least 12, 15, 18, 20, 25, 30, 35, 40 or 50 nucleotides in length. More preferably, the fragments are at least 100 nucleotides in length. Even more preferably, the fragments are more than 100 nucleotides in length. In some embodiments the fragments may be more than 500 nucleotides in length.

[0189] Any polynucleotide provided herein may be attached in overlapping areas or at random locations on the solid support. Alternatively the polynucleotides of the invention may be attached in an ordered array wherein each polynucleotide is attached to a distinct region of the solid support which does not overlap with the attachment site of any other polynucleotide. Preferably, such an ordered array of polynucleotides is designed to be “addressable” where the distinct locations are recorded and can be accessed as part of an assay procedure. Addressable polynucleotide arrays typically comprise a plurality of different oligonucleotide probes that are coupled to a surface of a substrate in different known locations. The knowledge of the precise location of each polynucleotides location makes these “addressable” arrays particularly useful in hybridization assays. Any addressable array technology known in the art can be employed with the polynucleotides of the invention. One particular embodiment of these polynucleotide arrays is known as the Genechips™, and has been generally described in U.S. Pat. No. 5,143,854; PCT publications WO 90/15070 and 92/10092, which disclosures are hereby incorporated by reference in their entireties. These arrays may generally be produced using mechanical synthesis methods or light directed synthesis methods which incorporate a combination of photolithographic methods and solid phase oligonucleotide synthesis (Fodor et al., 1991), which disclosure is hereby incorporated by reference in its entirety. The immobilization of arrays of oligonucleotides on solid supports has been rendered possible by the development of a technology generally identified as “Very Large Scale Immobilized Polymer Synthesis” (VLSIPS™) in which, typically, probes are immobilized in a high density array on a solid surface of a chip. Examples of VLSIPS™ technologies are provided in U.S. Pat. Nos. 5,143,854; and 5,412,087 and in PCT Publications WO 90/15070, WO 92/10092 and WO 95/11995, which disclosures are hereby incorporated by reference in their entireties, which describe methods for forming oligonucleotide arrays through techniques such as light-directed synthesis techniques. In designing strategies aimed at providing arrays of nucleotides immobilized on solid supports, further presentation strategies were developed to order and display the oligonucleotide arrays on the chips in an attempt to maximize hybridization patterns and sequence information. Examples of such presentation strategies are disclosed in PCT Publications WO 94/12305, WO 94/11530, WO 97/29212 and WO 97/31256, the disclosures of which are incorporated herein by reference in their entireties.

[0190] Consequently, the invention concerns an array of nucleic acid molecules comprising at least one polynucleotide of the invention, particularly a probe or primer as described herein. Preferably, the invention concerns an array of nucleic acids comprising at least two polynucleotides of the invention, particularly probes or primers as described herein. Preferably, the invention concerns an array of nucleic acids comprising at least five polynucleotides of the invention, particularly probes or primers as described herein.

[0191] A preferred embodiment of the present invention is an array of polynucleotides of at least 12, 15, 18, 20, 25, 30, 35, 40, 50, 100 or 500 nucleotides in length which includes at least 1, 2, 5, 10, 15, 20, 35, 50 or 100 sequences selected from the group consisting of the sequences of SEQ ID NOs:1-169, 339-455, 561-784 and sequences of clone inserts of the deposited clone pool, sequences fully complementary thereto, and fragments thereof.

Methods of Making the Polynucleotides of the Invention

[0192] The present invention also comprises methods of making the polynucleotides of the invention, including the polynucleotides of SEQ ID NOs:1-169, 339-455, 561-784, genomic DNA obtainable therefrom, or fragments thereof. These methods comprise sequentially linking together nucleotides to produce the nucleic acids having the preceding sequences. Polynucleotides of the invention may be synthesized either enzymatically using techniques well known to those skilled in the art including amplification or hybridization-based methods as described herein, or chemically.

[0193] A variety of chemical methods of synthesizing nucleic acids are known to those skilled in the art. In many of these methods, synthesis is conducted on a solid support. These included the 3′ phosphoramidite methods in which the 3′ terminal base of the desired oligonucleotide is immobilized on an insoluble carrier. The nucleotide base to be added is blocked at the 5′ hydroxyl and activated at the 3′ hydroxyl so as to cause coupling with the immobilized nucleotide base. Deblocking of the new immobilized nucleotide compound and repetition of the cycle will produce the desired polynucleotide. Alternatively, polynucleotides may be prepared as described in U.S. Pat. No. 5,049,656, which disclosure is hereby incorporated by reference in its entirety. In some embodiments, several polynucleotides prepared as described above are ligated together to generate longer polynucleotides having a desired sequence.

### Polypeptides of the Invention

[0194] The term “GENSET polypeptides” is used herein to embrace all of the proteins and polypeptides of the present invention. The present invention encompasses GENSET polypeptides, including recombinant, isolated or purified GENSET polypeptides consisting of, consisting essentially of, or comprising a sequence selected from the group consisting of SEQ ID NOs:170-338, 456-560, 785-918 and the polypeptides encoded by human cDNAs contained in the deposited clones. Other objects of the invention are polypeptides encoded by the polynucleotides of the invention as well as fusion polypeptides comprising such polypeptides.

Polypeptide Variants

[0195] The present invention further provides for GENSET polypeptides encoded by allelic and splice variants, orthologs, and/or species homologues. Procedures known in the art can be used to obtain, allelic variants, splice variants, orthologs, and/or species homologues of polynucleotides encoding by polypeptides of the group consisting of SEQ ID NOs:170-338, 456-560, 785-918 and polypeptides encoded by the clone inserts of the deposited clone pool, using information from the sequences disclosed herein or the clones deposited with the ATCC.

[0196] The polypeptides of the present invention also include polypeptides having an amino acid sequence at least 50% identical, more preferably at least 60% identical, and still more preferably 70%, 80%, 90%, 95%, 96%, 97%, 98% or 99% identical to a polypeptide selected from the group consisting of the sequences of SEQ ID NOs:170-338, 456-560, 785-918 and those encoded by the clone inserts of the deposited clone pool. By a polypeptide having an amino acid sequence at least, for example, 95% “identical” to a query amino acid sequence of the present invention, it is intended that the amino acid sequence of the subject polypeptide is identical to the query sequence except that the subject polypeptide sequence may include up to five amino acid alterations per each 100 amino acids of the query amino acid sequence. In other words, to obtain a polypeptide having an amino acid sequence at least 95% identical to a query amino acid sequence, up to 5% (5 of 100) of the amino acid residues in the subject sequence may be inserted, deleted, (indels) or substituted with another amino acid.

[0197] Further polypeptides of the present invention include polypeptides which have at least 90% similarity, more preferably at least 95% similarity, and still more preferably at least 96%, 97%, 98% or 99% similarity to those described above. By a polypeptide having an amino acid sequence at least, for example, 95% “similar” to a query amino acid sequence of the present invention, it is intended that the amino acid sequence of the subject polypeptide is similar (i.e. contains identical or equivalent amino acid residues) to the query sequence except that the subject polypeptide sequence may include up to five amino acid alterations per each 100 amino acids of the query amino acid sequence. In other words, to obtain a polypeptide having an amino acid sequence at least 95% similar to a query amino acid sequence, up to 5% (5 of 100) of the amino acid residues in the subject sequence may be inserted, deleted, (indels) or substituted with another non-equivalent amino acid.

[0198] These alterations of the reference sequence may occur at the amino or carboxy terminal positions of the reference amino acid sequence or anywhere between those terminal positions, interspersed either individually among residues in the reference sequence or in one or more contiguous groups within the reference sequence. The query sequence may be an entire amino acid sequence selected from the group consisting of sequences of SEQ ID NOs:170-338, 456-560, 785-918 and those encoded by the clone inserts of the deposited clone pool or any fragment specified as described herein.

[0199] The variant polypeptides described herein are included in the present invention regardless of whether they have their normal biological activity. This is because even where a particular polypeptide molecule does not have biological activity, one of skill in the art would still know how to use the polypeptide, for instance, as a vaccine or to generate antibodies. Other uses of the polypeptides of the present invention that do not have GENSET biological activity include, inter alia, as epitope tags, in epitope mapping, and as molecular weight markers on SDS-PAGE gels or on molecular sieve gel filtration columns using methods known to those of skill in the art. As described below, the polypeptides of the present invention can also be used to raise polyclonal and monoclonal antibodies, which are useful in assays for detecting GENSET protein expression or as agonists and antagonists capable of enhancing or inhibiting GENSET protein function. Further, such polypeptides can be used in the yeast two-hybrid system to “capture” GENSET protein binding proteins, which are also candidate agonists and antagonists according to the present invention (see, e.g., Fields et al. 1989, which disclosure is hereby incorporated by reference in its entirety).

Preparation of the Polypeptides of the Invention

[0200] The polypeptides of the present invention can be prepared in any suitable manner. Such polypeptides include isolated naturally occurring polypeptides, recombinantly produced polypeptides, synthetically produced polypeptides, or polypeptides produced by a combination of these methods. The polypeptides of the present invention are preferably provided in an isolated form, and may be partially or preferably substantially purified.

[0201] Consequently, the present invention also comprises methods of making the polypeptides of the invention, particularly polypeptides encoded by the cDNAs of SEQ ID NOs:1-169, 339-455, 561-784 or by the clone inserts of the deposited clone pool, genomic DNA obtainable therefrom, or fragments thereof and methods of making the polypeptides of SEQ ID NOs:170-338, 456-560, 785-918 or fragments thereof. The methods comprise sequentially linking together amino acids to produce the nucleic polypeptides having the preceding sequences. In some embodiments, the polypeptides made by these methods are 150 amino acids or less in length. In other embodiments, the polypeptides made by these methods are 120 amino acids or less in length.

Isolation

From Natural Sources

[0202] The GENSET proteins of the invention may be isolated from natural sources, including bodily fluids, tissues and cells, whether directly isolated or cultured cells, of humans or non-human animals. Methods for extracting and purifying natural proteins are known in the art, and include the use of detergents or chaotropic agents to disrupt particles followed by differential extraction and separation of the polypeptides by ion exchange chromatography, affinity chromatography, sedimentation according to density, and gel electrophoresis. See, for example, “Methods in Enymology, Academic Press, 1993” for a variety of methods for purifying proteins, which disclosure is hereby incorporated by reference in its entirety. Polypeptides of the invention also can be purified from natural sources using antibodies directed against the polypeptides of the invention, such as those described herein, in methods which are well known in the art of protein purification.

From Recombinant Sources

[0203] Preferably, the GENSET polypeptides of the invention are recombinantly produced using routine expression methods known in the art. The polynucleotide encoding the desired polypeptide is operably linked to a promoter into an expression vector suitable for any convenient host. Both eukaryotic and prokaryotic host systems are used in forming recombinant polypeptides. The polypeptide is then isolated from lysed cells or from the culture medium and purified to the extent needed for its intended use.

[0204] Any GENSET polynucleotide, including those described in SEQ ID NOs:1-169, 339-455, 561-784, those of clone inserts of the deposited clone pool, and allelic variants thereof may be used to express GENSET polypeptides. The nucleic acid encoding the GENSET polypeptide to be expressed is operably linked to a promoter in an expression vector using conventional cloning technology. The GENSET insert in the expression vector may comprise the full coding sequence for the GENSET protein or a portion thereof. For example, the GENSET derived insert may encode a polypeptide comprising at least 6, 8, 10, 12, 15, 20, 25, 30, 35, 40, 50, 60, 75, 100, 150 or 200 consecutive amino acids of a GENSET protein selected from the group consisting of sequences of SEQ ID NOs:170-338, 456-560, 785-918 and polypeptides encoded by the clone inserts of the deposited clone pool.

[0205] Consequently, a further embodiment of the present invention is a method of making a polypeptide comprising a protein selected from the group consisting of sequences of SEQ ID NOs:170-338, 456-560, 785-918 and polypeptides encoded by the clone inserts of the deposited clone pool, said method comprising the steps of:

[0206] a) obtaining a cDNA comprising a sequence selected from the group consisting of i) the sequences SEQ ID NOs:1-169, 339-455, 561-784, ii) the sequences of clone inserts of the deposited clone pool one, iii) sequences encoding one of the polypeptide of SEQ ID NOs:170-338, 456-560, 785-918, and iv) sequences of polynucleotides encoding a polypeptide which is encoded by one of the clone insert of the deposited clone pool;

[0207] b) inserting said cDNA in an expression vector such that the cDNA is operably linked to a promoter; and

[0208] c) introducing said expression vector into a host cell whereby said host cell produces said polypeptide.

[0209] In one aspect of this embodiment, the method further comprises the step of isolating the polypeptide. Another embodiment of the present invention is a polypeptide obtainable by the method described in the preceding paragraph.

[0210] The expression vector is any of the mammalian, yeast, insect or bacterial expression systems known in the art. Commercially available vectors and expression systems are available from a variety of suppliers including Genetics Institute (Cambridge, Mass.), Stratagene (La Jolla, Calif.), Promega (Madison, Wis.), and Invitrogen (San Diego, Calif.). If desired, to enhance expression and facilitate proper protein folding, the codon context and codon pairing of the sequence is optimized for the particular expression organism in which the expression vector is introduced, as explained in U.S. Pat. No. 5,082,767, which disclosure is hereby incorporated by reference in its entirety.

[0211] In one embodiment, the entire coding sequence of a GENSET cDNA and the 3′UTR through the poly A signal of the cDNA is operably linked to a promoter in the expression vector. Alternatively, if the nucleic acid encoding a portion of the GENSET protein lacks a methionine to serve as the initiation site, an initiating methionine can be introduced next to the first codon of the nucleic acid using conventional techniques. Similarly, if the insert from the GENSET cDNA lacks a poly A signal, this sequence can be added to the construct by, for example, splicing out the Poly A signal from pSG5 (Stratagene) using BglI and SalI restriction endonuclease enzymes and incorporating it into the mammalian expression vector pXT1 (Stratagene). pXT1 contains the LTRs and a portion of the gag gene from Moloney Murine Leukemia Virus. The position of the LTRs in the construct allow efficient stable transfection. The vector includes the Herpes Simplex Thymidine Kinase promoter and the selectable neomycin gene. The nucleic acid encoding the GENSET protein or a portion thereof is obtained by PCR from a vector containing a GENSET cDNA selected from the group consisting of the sequences of SEQ ID NOs:1-169, 339-455, 561-784 and the clone inserts of the deposited clone pool using oligonucleotide primers complementary to the GENSET cDNA or portion thereof and containing restriction endonuclease sequences for Pst I incorporated into the 5′ primer and BglII at the 5′ end of the corresponding cDNA 3′ primer, taking care to ensure that the sequence encoding the GENSET protein or a portion thereof is positioned properly with respect to the poly A signal. The purified fragment obtained from the resulting PCR reaction is digested with PstI, blunt ended with an exonuclease, digested with Bgl II, purified and ligated to pXTl, now containing a poly A signal and digested with BglII.

[0212] In another embodiment, it is often advantageous to add to the recombinant polynucleotide additional nucleotide sequence which codes for secretory or leader sequences, pro-sequences, sequences which aid in purification, such as multiple histidine residues, or an additional sequence for stability during recombinant production.

[0213] As a control, the expression vector lacking a cDNA insert is introduced into host cells or organisms.

[0214] Transfection of a GENSET expression vector into mouse NTH 3T3 cells is but one embodiment of introducing polynucleotides into host cells. Introduction of a polynucleotide encoding a polypeptide into a host cell can be effected by calcium phosphate transfection, DEAE-dextran mediated transfection, cationic lipid-mediated transfection, electroporation, transduction, infection, or other methods. Such methods are described in many standard laboratory manuals, such as Davis et al. (1986), which disclosure is hereby incorporated by reference in its entirety. It is specifically contemplated that the polypeptides of the present invention may in fact be expressed by a host cell lacking a recombinant vector.

[0215] Recombinant cell extracts, or proteins from the culture medium if the expressed polypeptide is secreted, are then prepared and proteins separated by gel electrophoresis. If desired, the proteins may be ammonium sulfate precipitated or separated based on size or charge prior to electrophoresis. The proteins present are detected using techniques such as Coomassie or silver staining or using antibodies against the protein encoded by the GENSET cDNA of interest. Coomassie and silver staining techniques are familiar to those skilled in the art.

[0216] Proteins from the host cells or organisms containing an expression vector which contains the GENSET cDNA or a fragment thereof are compared to those from the control cells or organism. The presence of a band from the cells containing the expression vector which is absent in control cells indicates that the GENSET cDNA is expressed. Generally, the band corresponding to the protein encoded by the GENSET cDNA will have a mobility near that expected based on the number of amino acids in the open reading frame of the cDNA. However, the band may have a mobility different than that expected as a result of modifications such as glycosylation, ubiquitination, or enzymatic cleavage.

[0217] Alternatively, the GENSET polypeptide to be expressed may also be a product of transgenic animals, i.e., as a component of the milk of transgenic cows, goats, pigs or sheep which are characterized by somatic or germ cells containing a nucleotide sequence encoding the protein of interest.

[0218] A polypeptide of this invention can be recovered and purified from recombinant cell cultures by well-known methods including differential extraction, ammonium sulfate or ethanol precipitation, acid extraction, anion or cation exchange chromatography, phosphocellulose chromatography, hydrophobic interaction chromatography, affinity chromatography, hydroxylapatite chromatography and lectin chromatography. See, for example, “Methods in Enzymology”, supra for a variety of methods for purifying proteins. Most preferably, high performance liquid chromatography (“HPLC”) is employed for purification. A recombinantly produced version of a GENSET polypeptide can be substantially purified using techniques described herein or otherwise known in the art, such as, for example, by the one-step method described in Smith and Johnson (1988), which disclosure is hereby incorporated by reference in its entirety. Polypeptides of the invention also can be purified from recombinant sources using antibodies directed against the polypeptides of the invention, such as those described herein, in methods which are well known in the art of protein purification.

[0219] Preferably, the recombinantly expressed GENSET polypeptide is purified using standard immunochromatography techniques such as the one described in the section entitled “Immunoaffinity Chromatography”. In such procedures, a solution containing the protein of interest, such as the culture medium or a cell extract, is applied to a column having antibodies against the protein attached to the chromatography matrix. The recombinant protein is allowed to bind the immunochromatography column. Thereafter, the column is washed to remove non-specifically bound proteins. The specifically bound secreted protein is then released from the column and recovered using standard techniques.

[0220] If antibody production is not possible, the GENSET cDNA sequence or fragment thereof may be incorporated into expression vectors designed for use in purification schemes employing chimeric polypeptides. In such strategies the coding sequence of the GENSET cDNA or fragment thereof is inserted in frame with the gene encoding the other half of the chimera. The other half of the chimera may be beta-globin or a nickel binding polypeptide encoding sequence. A chromatography matrix having antibody to beta-globin or nickel attached thereto is then used to purify the chimeric protein. Protease cleavage sites may be engineered between the beta-globin gene or the nickel binding polypeptide and the GENSET cDNA or fragment thereof. Thus, the two polypeptides of the chimera may be separated from one another by protease digestion.

[0221] One useful expression vector for generating beta-globin chimerics is pSG5 (Stratagene), which encodes rabbit beta-globin. Intron II of the rabbit beta-globin gene facilitates splicing of the expressed transcript, and the polyadenylation signal incorporated into the construct increases the level of expression. These techniques as described are well known to those skilled in the art of molecular biology. Standard methods are published in methods texts such as Davis et al., (1986) and many of the methods are available from Stratagene, Life Technologies, Inc., or Promega. Polypeptide may additionally be produced from the construct using in vitro translation systems such as the In vitro Express™ Translation Kit (Stratagene).

[0222] Depending upon the host employed in a recombinant production procedure, the polypeptides of the present invention may be glycosylated or may be non-glycosylated. In addition, polypeptides of the invention may also include an initial modified methionine residue, in some cases as a result of host-mediated processes. Thus, it is well known in the art that the N-terminal methionine encoded by the translation initiation codon generally is removed with high efficiency from any protein after translation in all eukaryotic cells. While the N-terminal methionine on most proteins also is efficiently removed in most prokaryotes, for some proteins, this prokaryotic removal process is inefficient, depending on the nature of the amino acid to which the N-terminal methionine is covalently linked.

From Chemical Synthesis

[0223] In addition, polypeptides of the invention, especially short protein fragments, can be chemically synthesized using techniques known in the art (See, e.g., Creighton, 1983; and Hunkapiller et al., 1984), which disclosures are hereby incorporated by reference in their entireties. For example, a polypeptide corresponding to a fragment of a polypeptide sequence of the invention can be synthesized by use of a peptide synthesizer. A variety of methods of making polypeptides are known to those skilled in the art, including methods in which the carboxyl terminal amino acid is bound to polyvinyl benzene or another suitable resin. The amino acid to be added possesses blocking groups on its amino moiety and any side chain reactive groups so that only its carboxyl moiety can react. The carboxyl group is activated with carbodiimide or another activating agent and allowed to couple to the immobilized amino acid. After removal of the blocking group, the cycle is repeated to generate a polypeptide having the desired sequence. Alternatively, the methods described in U.S. Pat. No. 5,049,656, which disclosure is hereby incorporated by reference in its entirety, may be used.

[0224] Furthermore, if desired, nonclassical amino acids or chemical amino acid analogs can be introduced as a substitution or addition into the polypeptide sequence. Non-classical amino acids include, but are not limited to, to the D-isomers of the common amino acids, 2,4-diaminobutyric acid, a-amino isobutyric acid, 4-aminobutyric acid, Abu, 2-amino butyric acid, g-Abu, e-Ahx, 6-amino hexanoic acid, Aib, 2-amino isobutyric acid, 3-amino propionic acid, ornithine, norleucine, norvaline, hydroxyproline, sarcosine, citrulline, homocitrulline, cysteic acid, t-butylglycine, t-butylalanine, phenylglycine, cyclohexylalanine, b-alanine, fluoroamino acids, designer amino acids such as b-methyl amino acids, Ca-methyl amino acids, Na-methyl amino acids, and amino acid analogs in general. Furthermore, the amino acid can be D (dextrorotary) or L (levorotary).

Modifications

[0225] The invention encompasses polypeptides which are differentially modified during or after translation, e.g., by glycosylation, acetylation, phosphorylation, amidation, derivatization by known protecting/blocking groups, proteolytic cleavage, linkage to an antibody molecule or other cellular ligand, etc. Any of numerous chemical modifications may be carried out by known techniques, including but not limited, to specific chemical cleavage by cyanogen bromide, trypsin, chymotrypsin, papain, V8 protease, NaBH4; acetylation, formylation, oxidation, reduction; metabolic synthesis in the presence of tunicamycin; etc.

[0226] Additional post-translational modifications encompassed by the invention include, for example, e.g., N-linked or O-linked carbohydrate chains, processing of N-terminal or C-terminal ends), attachment of chemical moieties to the amino acid backbone, chemical modifications of N-linked or O-linked carbohydrate chains, and addition or deletion of an N-terminal methionine residue as a result of prokaryotic host cell expression. The polypeptides may also be modified with a detectable label, such as an enzymatic, fluorescent, isotopic or affinity label to allow for detection and isolation of the protein.

[0227] Also provided by the invention are chemically modified derivatives of the polypeptides of the invention which may provide additional advantages such as increased solubility, stability and circulating time of the polypeptide, or decreased immunogenicity. See U.S. Pat. No: 4,179,337. The chemical moieties for derivatization may be selected See U.S. Pat. No: 4,179,337, which disclosure is hereby incorporated by reference in its entirety. The chemical moieties for derivatization may be selected from water soluble polymers such as polyethylene glycol, ethylene glycol/propylene glycol copolymers, carboxymethylcellulose, dextran, polyvinyl alcohol and the like. The polypeptides may be modified at random positions within the molecule, or at predetermined positions within the molecule and may include one, two, three or more attached chemical moieties.

[0228] The polymer may be of any molecular weight, and may be branched or unbranched. For polyethylene glycol, the preferred molecular weight is between about 1 kDa and about 100 kDa (the term “about” indicating that in preparations of polyethylene glycol, some molecules will weigh more, some less, than the stated molecular weight) for ease in handling and manufacturing. Other sizes may be used, depending on the desired therapeutic profile (e.g., the duration of sustained release desired, the effects, if any on biological activity, the ease in handling, the degree or lack of antigenicity and other known effects of the polyethylene glycol to a therapeutic protein or analog).

[0229] The polyethylene glycol molecules (or other chemical moieties) should be attached to the protein with consideration of effects on functional or antigenic domains of the protein. There are a number of attachment methods available to those skilled in the art, e.g., EP 0 401 384, (coupling PEG to G-CSF), and Malik et al. (1992) (reporting pegylation of GM-CSF using tresyl chloride), which disclosures are hereby incorporated by reference in their entireties. For example, polyethylene glycol may be covalently bound through amino acid residues via a reactive group, such as, a free amino or carboxyl group. Reactive groups are those to which an activated polyethylene glycol molecule may be bound. The amino acid residues having a free amino group may include lysine residues and the N-terminal amino acid residues; those having a free carboxyl group may include aspartic acid residues glutamic acid residues and the C-terminal amino acid residue. Sulfhydryl groups may also be used as a reactive group for attaching the polyethylene glycol molecules. Preferred for therapeutic purposes is attachment at an amino group, such as attachment at the N-terminus or lysine group.

[0230] One may specifically desire proteins chemically modified at the N-terminus. Using polyethylene glycol as an illustration of the present composition, one may select from a variety of polyethylene glycol molecules (by molecular weight, branching, etc.), the proportion of polyethylene glycol molecules to protein (polypeptide) molecules in the reaction mix, the type of pegylation reaction to be performed, and the method of obtaining the selected N-terminally pegylated protein. The method of obtaining the N-terminally pegylated preparation (i.e., separating this moiety from other monopegylated moieties if necessary) may be by purification of the N-terminally pegylated material from a population of pegylated protein molecules. Selective proteins chemically modified at the N-terminus modification may be accomplished by reductive alkylation, which exploits differential reactivity of different types of primary amino groups (lysine versus the N-terminal) available for derivatization in a particular protein. Under the appropriate reaction conditions, substantially selective derivatization of the protein at the N-terminus with a carbonyl group containing polymer is achieved.

Multimerization

[0231] The polypeptides of the invention may be in monomers or multimers (i.e., dimers, trimers, tetramers and higher multimers). Accordingly, the present invention relates to monomers and multimers of the polypeptides of the invention, their preparation, and compositions containing them. In specific embodiments, the polypeptides of the invention are monomers, dimers, trimers or tetramers. In additional embodiments, the multimers of the invention are at least dimers, at least trimers, or at least tetramers.

[0232] Multimers encompassed by the invention may be homomers or heteromers. As used herein, the term “homomer”, refers to a multimer containing only polypeptides corresponding to the amino acid sequences of SEQ ID NOs:170-338, 456-560, 785-918 or encoded by the clone inserts of the deposited clone pool (including fragments, variants, splice variants, and fusion proteins, corresponding to these polypeptides as described herein). These homomers may contain polypeptides having identical or different amino acid sequences. In a specific embodiment, a homomer of the invention is a multimer containing only polypeptides having an identical amino acid sequence. In another specific embodiment, a homomer of the invention is a multimer containing polypeptides having different amino acid sequences. In specific embodiments, the multimer of the invention is a homodimer (e.g., containing polypeptides having identical or different amino acid sequences) or a homotrimer (e.g., containing polypeptides having identical and/or different amino acid sequences). In additional embodiments, the homomenc multimer of the invention is at least a homodimer, at least a homotrimer, or at least a homotetramer.

[0233] As used herein, the term “heteromer” refers to a multimer containing one or more heterologous polypeptides (i.e., polypeptides of different proteins) in addition to the polypeptides of the invention. In a specific embodiment, the multimer of the invention is a heterodimer, a heterotrimer, or a heterotetramer. In additional embodiments, the heteromeric multimer of the invention is at least a heterodimer, at least a heterotrimer, or at least a heterotetramer.

[0234] Multimers of the invention may be the result of hydrophobic, hydrophilic, ionic and/or covalent associations and/or may be indirectly linked, by for example, liposome formation. Thus, in one embodiment, multimers of the invention, such as, for example, homodimers or homotrimers, are formed when polypeptides of the invention contact one another in solution. In another embodiment, heteromultimers of the invention, such as, for example, heterotrimers or heterotetramers, are formed when polypeptides of the invention contact antibodies to the polypeptides of the invention (including antibodies to the heterologous polypeptide sequence in a fusion protein of the invention) in solution. In other embodiments, multimers of the invention are formed by covalent associations with and/or between the polypeptides of the invention. Such covalent associations may involve one or more amino acid residues contained in the polypeptide sequence (e.g., that recited in the sequence listing, or contained in the polypeptide encoded by a deposited clone). In one instance, the covalent associations are cross-linking between cysteine residues located within the polypeptide sequences, which interact in the native (i.e., naturally occurring) polypeptide. In another instance, the covalent associations are the consequence of chemical or recombinant manipulation. Alternatively, such covalent associations may involve one or more amino acid residues contained in the heterologous polypeptide sequence in a fusion protein of the invention.

[0235] In one example, covalent associations are between the heterologous sequence contained in a fusion protein of the invention (see, e.g., U.S. Pat. No. 5,478,925, which disclosure is hereby incorporated by reference in its entirety). In a specific example, the covalent associations are between the heterologous sequence contained in an Fc fusion protein of the invention (as described herein). In another specific example, covalent associations of fusion proteins of the invention are between heterologous polypeptide sequence from another protein that is capable of forming covalently associated multimers, such as for example, oseteoprotegerin (see, e.g., International Publication No: WO 98/49305, the contents of which are herein incorporated by reference in its entirety). In another embodiment, two or more polypeptides of the invention are joined through peptide linkers. Examples include those peptide linkers described in U.S. Pat. No. 5,073,627 (hereby incorporated by reference). Proteins comprising multiple polypeptides of the invention separated by peptide linkers may be produced using conventional recombinant DNA technology.

[0236] Another method for preparing multimer polypeptides of the invention involves the use of polypeptides of the invention fused to a leucine zipper or isoleucine zipper polypeptide sequence. Leucine zipper and isoleucine zipper domains are polypeptides that promote multimerization of the proteins in which they are found. Leucine zippers were originally identified in several DNA-binding proteins, and have since been found in a variety of different proteins (Landschulz et al., 1988). Among the known leucine zippers are naturally occurring peptides and derivatives thereof that dimerize or trimerize. Examples of leucine zipper domains suitable for producing soluble multimeric proteins of the invention are those described in PCT application WO 94/10308, hereby incorporated by reference. Recombinant fusion proteins comprising a polypeptide of the invention fused to a polypeptide sequence that dimerizes or trimerizes in solution are expressed in suitable host cells, and the resulting soluble multimeric fusion protein is recovered from the culture supernatant using techniques known in the art.

[0237] Trimeric polypeptides of the invention may offer the advantage of enhanced biological activity. Preferred leucine zipper moieties and isoleucine moieties are those that preferentially form trimers. One example is a leucine zipper derived from lung surfactant protein D (SPD), as described in Hoppe et al. (1994) and in U.S. patent application Ser. No. 08/446,922, which disclosure is hereby incorporated by reference in its entirety. Other peptides derived from naturally occurring trimeric proteins may be employed in preparing trimeric polypeptides of the invention. In another example, proteins of the invention are associated by interactions between Flag® polypeptide sequence contained in fusion proteins of the invention containing Flag® polypeptide sequence. In a further embodiment, associations proteins of the invention are associated by interactions between heterologous polypeptide sequence contained in Flag® fusion proteins of the invention and anti Flag® antibody.

[0238] The multimers of the invention may be generated using chemical techniques known in the art. For example, polypeptides desired to be contained in the multimers of the invention may be chemically cross-linked using linker molecules and linker molecule length optimization techniques known in the art (see, e.g., U.S. Pat. No. 5,478,925, which is herein incorporated by reference in its entirety). Additionally, multimers of the invention may be generated using techniques known in the art to form one or more inter-molecule cross-links between the cysteine residues located within the sequence of the polypeptides desired to be contained in the multimer (see, e.g., U.S. Pat. No. 5,478,925, which is herein incorporated by reference in its entirety). Further, polypeptides of the invention may be routinely modified by the addition of cysteine or biotin to the C terminus or N-terminus of the polypeptide and techniques known in the art may be applied to generate multimers containing one or more of these modified polypeptides (see, e.g., U.S. Pat. No. 5,478,925, which is herein incorporated by reference in its entirety). Additionally, other techniques known in the art may be applied to generate liposomes containing the polypeptide components desired to be contained in the multimer of the invention (see, e.g., U.S. Pat. No. 5,478,925, which is herein incorporated by reference in its entirety).

[0239] Alternatively, multimers of the invention may be generated using genetic engineering techniques known in the art. In one embodiment, polypeptides contained in multimers of the invention are produced recombinantly using fusion protein technology described herein or otherwise known in the art (see, e.g., U.S. Pat. No. 5,478,925, which is herein incorporated by reference in its entirety). In a specific embodiment, polynucleotides coding for a homodimer of the invention are generated by ligating a polynucleotide sequence encoding a polypeptide of the invention to a sequence encoding a linker polypeptide and then further to a synthetic polynucleotide encoding the translated product of the polypeptide in the reverse orientation from the original C-terminus to the N-terminus (lacking the leader sequence) (see, e.g., U.S. Pat. No. 5,478,925, which is herein incorporated by reference in its entirety). In another embodiment, recombinant techniques described herein or otherwise known in the art are applied to generate recombinant polypeptides of the invention which contain a transmembrane domain (or hydrophobic or signal peptide) and which can be incorporated by membrane reconstitution techniques into liposomes (see, e.g., U.S. Pat. No. 5,478,925, which is herein incorporated by reference in its entirety).

Mutated Polypeptides

[0240] To improve or alter the characteristics of GENSET polypeptides of the present invention, protein engineering may be employed. Recombinant DNA technology known to those skilled in the art can be used to create novel mutant proteins or muteins including single or multiple amino acid substitutions, deletions, additions, or fusion proteins. Such modified polypeptides can show, e.g., increased/decreased biological activity or increased/decreased stability. In addition, they may be purified in higher yields and show better solubility than the corresponding natural polypeptide, at least under certain purification and storage conditions. Further, the polypeptides of the present invention may be produced as multimers including dimers, trimers and tetramers. Multimerization may be facilitated by linkers or recombinantly though heterologous polypeptides such as Fc regions.

N- and C-terminal Deletions

[0241] It is known in the art that one or more amino acids may be deleted from the N-terminus or C-terminus without substantial loss of biological function. For instance, Ron et al. (1993), reported modified KGF proteins that had heparin binding activity even if 3, 8, or 27 N-terminal amino acid residues were missing. Accordingly, the present invention provides polypeptides having one or more residues deleted from the amino terminus of the polypeptides of SEQ ID NOs:170-338, 456-560, 785-918 or that encoded by the clone inserts of the deposited clone pool. Similarly, many examples of biologically functional C-terminal deletion mutants are known. For instance, Interferon gamma shows up to ten times higher activities by deleting 810 amino acid residues from the C-terminus of the protein (See, e.g., Dobeli, et al. 1988), which disclosure is hereby incorporated by reference in its entirety. Accordingly, the present invention provides polypeptides having one or more residues deleted from the carboxy terminus of the polypeptides shown of SEQ ID NOs:170-338, 456-560, 785-918 or encoded by the clone inserts of the deposited clone pool. The invention also provides polypeptides having one or more amino acids deleted from both the amino and the carboxyl termini as described below.

Other Mutations

[0242] Other mutants in addition to N- and C-terminal deletion forms of the protein discussed above are included in the present invention. It also will be recognized by one of ordinary skill in the art that some amino acid sequences of the GENSET polypeptides of the present invention can be varied without significant effect of the structure or function of the protein. If such differences in sequence are contemplated, it should be remembered that there will be critical areas on the protein which determine activity. Thus, the invention further includes variations of the GENSET polypeptides which show substantial GENSET polypeptide activity. Such mutants include deletions, insertions, inversions, repeats, and substitutions selected according to general rules known in the art so as to have little effect on activity. For example, guidance concerning how to make phenotypically silent amino acid substitutions is provided.

[0243] There are two main approaches for studying the tolerance of an amino acid sequence to change (see, Bowie et al. 1994, which disclosure is hereby incorporated by reference in its entirety). The first method relies on the process of evolution, in which mutations are either accepted or rejected by natural selection.

[0244] The second approach uses genetic engineering to introduce amino acid changes at specific positions of a cloned gene and selections or screens to identify sequences that maintain functionality. These studies have revealed that proteins are surprisingly tolerant of amino acid substitutions. The studies indicate which amino acid changes are likely to be permissive at a certain position of the protein. For example, most buried amino acid residues require nonpolar side chains, whereas few features of surface side chains are generally conserved. Other such phenotypically silent substitutions are described by Bowie et al. (supra) and the references cited therein.

[0245] Typically seen as conservative substitutions are the replacements, one for another, among the aliphatic amino acids Ala, Val, Leu and Phe; interchange of the hydroxyl residues Ser and Thr, exchange of the acidic residues Asp and Glu, substitution between the amide residues Asn and Gln, exchange of the basic residues Lys and Arg and replacements among the aromatic residues Phe, Tyr. Thus, the fragment, derivative, analog, or homologue of the polypeptide of the present invention may be, for example: (i) one in which one or more of the amino acid residues are substituted with a conserved or non-conserved amino acid residue (preferably a conserved amino acid residue) and such substituted amino acid residue may or may not be one encoded by the genetic code: or (ii) one in which one or more of the amino acid residues includes a substituent group: or (iii) one in which the GENSET polypeptide is fused with another compound, such as a compound to increase the half-life of the polypeptide (for example, polyethylene glycol): or (iv) one in which the additional amino acids are fused to the above form of the polypeptide, such as an IgG Fc fusion region peptide or leader or secretory sequence or a sequence which is employed for purification of the above form of the polypeptide or a pro-protein sequence. Such fragments, derivatives and analogs are deemed to be within the scope of those skilled in the art from the teachings herein.

[0246] Thus, the GENSET polypeptides of the present invention may include one or more amino acid substitutions, deletions, or additions, either from natural mutations or human manipulation. As indicated, changes are preferably of a minor nature, such as conservative amino acid substitutions that do not significantly affect the folding or activity of the protein. The following groups of amino acids generally represent equivalent changes: (1) Ala, Pro, Gly, Glu, Asp, Gin, Asn, Ser, Thr; (2) Cys, Ser, Tyr, Thr; (3) Val, Ile, Leu, Met, Ala, Phe; (4) Lys, Arg, His; (5) Phe, Tyr, Trp, His.

[0247] A specific embodiment of a modified GENSET peptide molecule of interest according to the present invention, includes, but is not limited to, a peptide molecule which is resistant to proteolysis, is a peptide in which the —CONH— peptide bond is modified and replaced by a (CH2NH) reduced bond, a (NHCO) retro inverso bond, a (CH2-O) methylene-oxy bond, a (CH2-S) thiomethylene bond, a (CH2CH2) carba bond, a (CO—CH2) cetomethylene bond, a (CHOH—CH2) hydroxyethylene bond), a (N—N) bound, a E-alcene bond or also a —CH═CH— bond. The invention also encompasses a human GENSET polypeptide or a fragment or a variant thereof in which at least one peptide bond has been modified as described above.

[0248] Amino acids in the GENSET proteins of the present invention that are essential for function can be identified by methods known in the art, such as site-directed mutagenesis or alanine-scanning mutagenesis (see, e.g., Cunningham et al. 1989, which disclosure is hereby incorporated by reference in its entirety). The latter procedure introduces single alanine mutations at every residue in the molecule. The resulting mutant molecules are then tested for biological activity using assays appropriate for measuring the function of the particular protein. Of special interest are substitutions of charged amino acids with other charged or neutral amino acids which may produce proteins with highly desirable improved characteristics, such as less aggregation. Aggregation may not only reduce activity but also be problematic when preparing pharmaceutical formulations, because aggregates can be immunogenic, (see, e.g., Pinckard et al., 1967; Robbins, et al., 1987; and Cleland, et al., 1993).

[0249] A further embodiment of the invention relates to a polypeptide which comprises the amino acid sequence of a GENSET polypeptide having an amino acid sequence which contains at least one conservative amino acid substitution, but not more than 50 conservative amino acid substitutions, not more than 40 conservative amino acid substitutions, not more than 30 conservative amino acid substitutions, and not more than 20 conservative amino acid substitutions. Also provided are polypeptides which comprise the amino acid sequence of a GENSET polypeptide, having at least one, but not more than 10, 9, 8, 7, 6, 5, 4, 3, 2 or 1 conservative amino acid substitutions.

Polypeptide Fragments

Structural Definition

[0250] The present invention is further directed to fragments of the amino acid sequences described herein such as the polypeptides of SEQ ID NOs:170-338, 456-560, 785-918 or those encoded by the clone inserts of the deposited clone pool. More specifically, the present invention embodies purified, isolated, and recombinant polypeptides comprising at least 6, preferably at least 8 to 10, more preferably 12, 15, 20, 25, 30, 35, 40, 50, 60, 75, 100, 125, 150, 175, 200, 225, 250, 275, or 300 consecutive amino acids of a polypeptide selected from the group consisting of the sequences of SEQ ID NOs:170-338, 456-560, 785-918, the polypeptides encoded by the clone inserts of the deposited clone pool, and other polypeptides of the present invention.

[0251] In addition to the above polypeptide fragments, further preferred sub-genuses of polypeptides comprise at least 6 amino acids, wherein “at least 6” is defined as any integer between 6 and the integer representing the C-terminal amino acid of the polypeptide of the present invention including the polypeptide sequences of the sequence listing below. Further included are species of polypeptide fragments at least 6 amino acids in length, as described above, that are further specified in terms of their N-terminal and C-terminal positions. However, included in the present invention as individual species are all polypeptide fragments, at least 6 amino acids in length, as described above, and may be particularly specified by a N-terminal and C-terminal position. That is, every combination of a N-terminal and C-terminal position that a fragment at least 6 contiguous amino acid residues in length could occupy, on any given amino acid sequence of the sequence listing or of the present invention is included in the present invention

[0252] The present invention also provides for the exclusion of any fragment species specified by N-terminal and C-terminal positions or of any fragment sub-genus specified by size in amino acid residues as described above. Any number of fragments specified by N-terminal and C-terminal positions or by size in amino acid residues as described above may be excluded as individual species.

[0253] The above polypeptide fragments of the present invention can be immediately envisaged using the above description and are therefore not individually listed solely for the purpose of not unnecessarily lengthening the specification. Moreover, the above fragments need not have a GENSET biological activity, although polypeptides having these activities are preferred embodiments of the invention, since they would be useful, for example, in immunoassays, in epitope mapping, epitope tagging, as vaccines, and as molecular weight markers. The above fragments may also be used to generate antibodies to a particular portion of the polypeptide. These antibodies can then be used in immunoassays well known in the art to distinguish between human and non-human cells and tissues or to determine whether cells or tissues in a biological sample are or are not of the same type which express the polypeptides of the present invention.

[0254] It is noted that the above species of polypeptide fragments of the present invention may alternatively be described by the formula “a to b”; where “a” equals the N-terminal most amino acid position and “b” equals the C-terminal most amino acid position of the polynucleotide; and further where “a” equals an integer between 1 and the number of amino acids of the polypeptide sequence of the present invention minus 6, and where “b” equals an integer between 7 and the number of amino acids of the polypeptide sequence of the present invention; and where “a” is an integer smaller then “b” by at least 6.

[0255] The present invention also provides for the exclusion of any species of polypeptide fragments of the present invention specified by 5′ and 3′ positions or sub-genuses of polypeptides specified by size in amino acids as described above. Any number of fragments specified by 5′ and 3′ positions or by size in amino acids, as described above, may be excluded.

Functional Definition

Domains

[0256] Preferred polynucleotide fragments of the invention are domains of polypeptides of the invention. Such domains may eventually comprise linear or structural motifs and signatures including, but not limited to, leucine zippers, helix-turn-helix motifs, post-translational modification sites such as glycosylation sites, ubiquitination sites, alpha helices, and beta sheets, signal sequences encoding signal peptides which direct the secretion of the encoded proteins, sequences implicated in transcription regulation such as homeoboxes, acidic stretches, enzymatic active sites, substrate binding sites, and enzymatic cleavage sites. Such domains may present a particular biological activity such as DNA or RNA-binding, secretion of proteins, transcription regulation, enzymatic activity, substrate binding activity, etc.

[0257] A domain has a size generally comprised between 3 and 1000 amino acids. In a preferred embodiment, domains comprise a number of amino acids that is any integer between 6 and 200. Domains may be synthesized using any methods known to those skilled in the art, including those disclosed herein, particularly in the section entitled “Preparation of the polypeptides of the invention”. Methods for determining the amino acids which make up a domain with a particular biological activity include mutagenesis studies and assays to determine the biological activity to be tested.

[0258] Alternatively, the polypeptides of the invention may be scanned for motifs, domains and/or signatures in databases using any computer method known to those skilled in the art. Searchable databases include Prosite (Hofmann et al., 1999; Bucher and Bairoch 1994), Pfam (Sonnhammer et al., 1997; Henikoffet al., 2000; Bateman et al., 2000), Blocks (Henikoffet al., 2000), Print (Attwood et al., 1996), Prodom (Sonnhammer and Kahn, 1994; Corpet et al. 2000), Sbase (Pongor et al., 1993; Murvai et al., 2000), Smart (Schultz et al., 1998), Dali/FSSP (Holm and Sander, 1996, 1997 and 1999), HSSP (Sander and Schneider 1991), CATH (Orengo et al., 1997; Pearl et al., 2000), SCOP (Murzin et al., 1995; Lo Conte et al., 2000), COG (Tatusov et al., 1997 and 2000), specific family databases and derivatives thereof (Nevill-Manning et al., 1998; Yona et al., 1999; Attwood et al., 2000), each of which disclosures are hereby incorporated by reference in their entireties. For a review on available databases, see issue 1 of volume 28 of Nucleic Acid Research (2000), which disclosure is hereby incorporated by reference in its entirety.

[0259] The domains of the present invention preferably comprises 6 to 200 amino acids (i.e. any integer between 6 and 200, inclusive) of a polypeptide of the present invention. Also, included in the present invention are domain fragments between the integers of 6 and the full length GENSET sequence of the sequence listing. All combinations of sequences between the integers of 6 and the full-length sequence of a GENSET polypeptide are included. The domain fragments may be specified by either the number of contiguous amino acid residues (as a sub-genus) or by specific N-terminal and C-terminal positions (as species) as described above for the polypeptide fragments of the present invention. Any number of domain fragments of the present invention may also be excluded in the same manner.

Epitopes and Antibody Fusions:

[0260] A preferred embodiment of the present invention is directed to epitope-bearing polypeptides and epitope-bearing polypeptide fragments. These epitopes may be “antigenic epitopes” or both an “antigenic epitope” and an “immunogenic epitope”. An “immunogenic epitope” is defined as a part of a protein that elicits an antibody response in vivo when the polypeptide is the immunogen. On the other hand, a region of polypeptide to which an antibody binds is defined as an “antigenic determinant” or “antigenic epitope.” The number of immunogenic epitopes of a protein generally is less than the number of antigenic epitopes (See, e.g., Geysen, et al., 1984), which disclosure is hereby incorporated by reference in its entirety. It is particularly noted that although a particular epitope may not be immunogenic, it is nonetheless useful since antibodies can be made to both immunogenic and antigenic epitopes.

[0261] An epitope can comprise as few as 3 amino acids in a spatial conformation, which is unique to the epitope. Generally an epitope consists of at least 6 such amino acids, and more often at least 8-10 such amino acids. In preferred embodiment, antigenic epitopes comprise a number of amino acids that is any integer between 3 and 50. Fragments which function as epitopes may be produced by any conventional means (See, e.g., Houghten, 1985), also further described in U.S. Pat. No. 4,631,21, which disclosures are hereby incorporated by reference in their entireties. Methods for determining the amino acids which make up an epitope include x-ray crystallography, 2-dimensional nuclear magnetic resonance, and epitope mapping, e.g., the Pepscan method described by Geysen et al. (1984); PCT Publication No. WO 84/03564; and PCT Publication No. WO 84/03506, which disclosures are hereby incorporated by reference in their entireties. Another example is the algorithm of Jameson and Wolf, (1988) (said reference incorporated by reference in its entirety). The Jameson-Wolf antigenic analysis, for example, may be performed using the computer program PROTEAN, using default parameters (Version 4.0 Windows, DNASTAR, Inc., 1228 South Park Street Madison, Wis.

[0262] The epitope-bearing fragments of the present invention preferably comprise 6 to 50 amino acids (i.e. any integer between 6 and 50, inclusive) of a polypeptide of the present invention. Also, included in the present invention are antigenic fragments between the integers of 6 and the full length GENSET sequence of the sequence listing. All combinations of sequences between the integers of 6 and the full-length sequence of a GENSET polypeptide are included. The epitope-bearing fragments may be specified by either the number of contiguous amino acid residues (as a sub-genus) or by specific N-terminal and C-terminal positions (as species) as described above for the polypeptide fragments of the present invention. Any number of epitope-bearing fragments of the present invention may also be excluded in the same manner.

[0263] Antigenic epitopes are useful, for example, to raise antibodies, including monoclonal antibodies that specifically bind the epitope (see, Wilson et al., 1984; and Sutcliffe, et al., 1983, which disclosures are hereby incorporated by reference in their entireties). The antibodies are then used in various techniques such as diagnostic and tissue/cell identification techniques, as described herein, and in purification methods such as immunoaffinity chromatography.

[0264] Similarly, immunogenic epitopes can be used to induce antibodies according to methods well known in the art (See, Sutcliffe et al., supra; Wilson et al., supra; Chow et al.(1985); and Bittle, et al., (1985), which disclosures are hereby incorporated by reference in their entireties). A preferred immunogenic epitope includes the natural GENSET protein. The immunogenic epitopes may be presented together with a carrier protein, such as an albumin, to an animal system (such as rabbit or mouse) or, if it is long enough (at least about 25 amino acids), without a carrier. However, immunogenic epitopes comprising as few as 8 to 10 amino acids have been shown to be sufficient to raise antibodies capable of binding to, at the very least, linear epitopes in a denatured polypeptide (e.g., in Western blotting.).

[0265] Epitope-bearing polypeptides of the present invention are used to induce antibodies according to methods well known in the art including, but not limited to, in vivo immunization, in vitro immunization, and phage display methods (See, e.g., Sutcliffe, et al., supra; Wilson, et al., supra, and Bittle, et al., supra). If in vivo immunization is used, animals may be immunized with free peptide; however, anti-peptide antibody titer may be boosted by coupling of the peptide to a macromolecular carrier, such as keyhole limpet hemacyanin (KLH) or tetanus toxoid. For instance, peptides containing cysteine residues may be coupled to a carrier using a linker such as -maleimidobenzoyl-N-hydroxysuccinimide ester (MBS), while other peptides may be coupled to carriers using a more general linking agent such as glutaraldehyde. Animals such as rabbits, rats and mice are immunized with either free or carrier-coupled peptides, for instance, by intraperitoneal and/or intradermal injection of emulsions containing about 100 μgs of peptide or carrier protein and Freund's adjuvant. Several booster injections may be needed, for instance, at intervals of about two weeks, to provide a useful titer of anti-peptide antibody, which can be detected, for example, by ELISA assay using free peptide adsorbed to a solid surface. The titer of anti-peptide antibodies in serum from an immunized animal may be increased by selection of anti-peptide antibodies, for instance, by adsorption to the peptide on a solid support and elution of the selected antibodies according to methods well known in the art.

[0266] As one of skill in the art will appreciate, and discussed above, the polypeptides of the present invention comprising an immunogenic or antigenic epitope can be fused to heterologous polypeptide sequences. For example, the polypeptides of the present invention may be fused with the constant domain of immunoglobulins (IgA, IgE, IgG, IgM), or portions thereof (CH1, CH2, CH3, any combination thereof including both entire domains and portions thereof) resulting in chimeric polypeptides. These fusion proteins facilitate purification, and show an increased half-life in vivo. This has been shown, e.g., for chimeric proteins consisting of the first two domains of the human CD4-polypeptide and various domains of the constant regions of the heavy or light chains of mammalian immunoglobulins (See, e.g., EPA 0,394,827; and Traunecker et al., 1988, which disclosures are hereby incorporated by reference in their entireties). Fusion proteins that have a disulfide-linked dimeric structure due to the IgG portion can also be more efficient in binding and neutralizing other molecules than monomeric polypeptides or fragments thereof alone (See, e.g., Fountoulakis et al., 1995, which disclosure is hereby incorporated by reference in its entirety). Nucleic acids encoding the above epitopes can also be recombined with a gene of interest as an epitope tag to aid in detection and purification of the expressed polypeptide.

[0267] Additional fusion proteins of the invention may be generated through the techniques of gene-shuffling, motif-shuffling, exon-shuffling, or codon-shuffling (collectively referred to as “DNA shuffling”). DNA shuffling may be employed to modulate the activities of polypeptides of the present invention thereby effectively generating agonists and antagonists of the polypeptides. See, for example, U.S. Pat. Nos.: 5,605,793; 5,811,238; 5,834,252; 5,837,458; and Patten, et al., (1997); Harayama, (1998); Hansson, et al (1999); and Lorenzo and Blasco, (1998). (Each of these documents are hereby incorporated by reference). In one embodiment, one or more components, motifs, sections, parts, domains, fragments, etc., of coding polynucleotides of the invention, or the polypeptides encoded thereby may be recombined with one or more components, motifs, sections, parts, domains, fragments, etc. of one or more heterologous molecules.

[0268] The present invention further encompasses any combination of the polypeptide fragments listed in this section.

Antibodies

Definitions

[0269] The present invention further relates to antibodies and T-cell antigen receptors (TCR), which specifically bind the polypeptides, and more specifically, the epitopes of the polypeptides of the present invention. The antibodies of the present invention include IgG (including IgG1, IgG2, IgG3, and IgG4), IgA (including IgA1 and IgA2), IgD, IgE, or IgM, and IgY. The term “antibody” (Ab) refers to a polypeptide or group of polypeptides which are comprised of at least one binding domain, where a binding domain is formed from the folding of variable domains of an antibody molecule to form three-dimensional binding spaces with an internal surface shape and charge distribution complementary to the features of an antigenic determinant of an antigen, which allows an immunological reaction with the antigen. As used herein, the term “antibody” is meant to include whole antibodies, including single-chain whole antibodies, and antigen binding fragments thereof. In a preferred embodiment the antibodies are human antigen binding antibody fragments of the present invention include, but are not limited to, Fab, Fab′F(ab)2 and F(ab′)2, Fd, single-chain Fvs (scFv), single-chain antibodies, disulfide-linked Fvs (sdFv) and fragments comprising either a V_{L} or V_{H} domain. The antibodies may be from any animal origin including birds and mammals. Preferably, the antibodies are human, murine, rabbit, goat, guinea pig, camel, horse, or chicken.

[0270] Antigen-binding antibody fragments, including single-chain antibodies, may comprise the variable region(s) alone or in combination with the entire or partial of the following: hinge region, CH1, CH2, and CH3 domains. Also included in the invention are any combinations of variable region(s) and hinge region, CH1, CH2, and CH3 domains. The present invention further includes chimeric, humanized, and human monoclonal and polyclonal antibodies, which specifically bind the polypeptides of the present invention. The present invention further includes antibodies that are anti-idiotypic to the antibodies of the present invention.

[0271] The antibodies of the present invention may be monospecific, bispecific, and trispecific or have greater multispecificity. Multispecific antibodies may be specific for different epitopes of a polypeptide of the present invention or may be specific for both a polypeptide of the present invention as well as for heterologous compositions, such as a heterologous polypeptide or solid support material. See, e.g., WO 93/17715; WO 92/08802; WO 91/00360; WO 92/05793; Tutt, et al. (1991); U.S. Pat. Nos. 5,573,920, 4,474,893, 5,601,819, 4,714,681, 4,925,648; Kostelny et al. (1992), which disclosures are hereby incorporated by reference in their entireties.

[0272] Antibodies of the present invention may be described or specified in terms of the epitope(s) or epitope-bearing portion(s) of a polypeptide of the present invention, which are recognized or specifically bound by the antibody. The antibodies may specifically bind a complete protein encoded by a nucleic acid of the present invention, or a fragment thereof. Therefore, the epitope(s) or epitope bearing polypeptide portion(s) may be specified as described herein, e.g., by N-terminal and C-terminal positions, by size in contiguous amino acid residues, or otherwise described herein (including the sequence listing). Antibodies which specifically bind any epitope or polypeptide of the present invention may also be excluded as individual species. Therefore, the present invention includes antibodies that specifically bind specified polypeptides of the present invention, and allows for the exclusion of the same.

[0273] Thus, another embodiment of the present invention is a purified or isolated antibody capable of specifically binding to a polypeptide comprising a sequence selected from the group consisting of the sequences of SEQ ID NOs:170-338, 456-560, 785-918 and the sequences of the clone inserts of the deposited clone pool. In one aspect of this embodiment, the antibody is capable of binding to an epitope-containing polypeptide comprising at least 6 consecutive amino acids, preferably at least 8 to 10 consecutive amino acids, more preferably at least 12, 15, 20, 25, 30, 40, 50, or 100 consecutive amino acids of a sequence selected from the group consisting of SEQ ID NOs:170-338, 456-560, 785-918 and sequences of the clone inserts of the deposited clone pool.

[0274] Antibodies of the present invention may also be described or specified in terms of their cross-reactivity. Antibodies that do not specifically bind any other analog, ortholog, or homologue of the polypeptides of the present invention are included. Antibodies that do not bind polypeptides with less than 95%, less than 90%, less than 85%, less than 80%, less than 75%, less than 70%, less than 65%, less than 60%, less than 55%, and less than 50% identity (as calculated using methods known in the art and described herein, e.g., using FASTDB and the parameters set forth herein) to a polypeptide of the present invention are also included in the present invention. Further included in the present invention are antibodies, which only bind polypeptides encoded by polynucleotides, which hybridize to a polynucleotide of the present invention under stringent hybridization conditions (as described herein). Antibodies of the present invention may also be described or specified in terms of their binding affinity. Preferred binding affinities include those with a issociation constant or Kd less than 5×10⁻⁶M, 10⁻⁶M, 5×10⁻⁷M, 10⁻⁷M, 5×10⁻⁸M, 10⁻⁸M, 5×10⁻⁹M, 10⁻⁹M, 5×10⁻¹⁰M, 10⁻¹⁰M, 5×10⁻¹¹M, 10⁻¹¹M, 5×10⁻¹²M, 10⁻¹²M, 5×10⁻¹³M, 10⁻¹³M, 5×10⁻¹⁴M, 10⁻¹⁴M, 5×10⁻¹⁵M, and 10⁻¹⁵M.

[0275] The invention also concerns a purified or isolated antibody capable of specifically binding to a mutated GENSET protein or to a fragment or variant thereof comprising an epitope of the mutated GENSET protein.

Preparation of Antibodies

[0276] The antibodies of the present invention may be prepared by any suitable method known in the art. Some of these methods are described in more detail in the example entitled “Preparation of Antibody Compositions to the GENSET protein”. For example, a polypeptide of the present invention or an antigenic fragment thereof can be administered to an animal in order to induce the production of sera containing “polyclonal antibodies”. As used herein, the term “monoclonal antibody” is not limited to antibodies produced through hybridoma technology but it rather refers to an antibody that is derived from a single clone, including eukaryotic, prokaryotic, or phage clone, and not the method by which it is produced. Monoclonal antibodies can be prepared using a wide variety of techniques known in the art including the use of hybridoma, recombinant, and phage display technology.

[0277] Hybridoma techniques include those known in the art (See, e.g., Harlow et al. 1988; Hammerling, et al, 1981). (Said references incorporated by reference in their entireties). Fab and F(ab′)2 fragments may be produced, for example, from hybridoma-produced antibodies by proteolytic cleavage, using enzymes such as papain (to produce Fab fragments) or pepsin (to produce F(ab′)2 fragments).

[0278] Alternatively, antibodies of the present invention can be produced through the application of recombinant DNA technology or through synthetic chemistry using methods known in the art. For example, the antibodies of the present invention can be prepared using various phage display methods known in the art. In phage display methods, functional antibody domains are displayed on the surface of a phage particle, which carries polynucleotide sequences encoding them. Phage with a desired binding property are selected from a repertoire or combinatorial antibody library (e.g. human or murine) by selecting directly with antigen, typically antigen bound or captured to a solid surface or bead. Phage used in these methods are typically filamentous phage including fd and M13 with Fab, Fv or disulfide stabilized Fv antibody domains recombinantly fused to either the phage gene III or gene VIII protein. Examples of phage display methods that can be used to make the antibodies of the present invention include those disclosed in Brinkman et al. (1995); Ames, et al. (1995); Kettleborough, et al. (1994); Persic, et al. (1997); Burton et al. (1994); PCT/GB91/01134; WO 90/02809; WO 91/10737; WO 92/01047; WO 92/18619; WO 93/11236; WO 95/15982; WO 95/20401; and U.S. Pat. Nos. 5,698,426, 5,223,409, 5,403,484, 5,580,717, 5,427,908, 5,750,753, 5,821,047, 5,571,698, 5,427,908, 5,516,637, 5,780,225, 5,658,727 and 5,733,743 (said references incorporated by reference in their entireties).

[0279] As described in the above references, after phage selection, the antibody coding regions from the phage can be isolated and used to generate whole antibodies, including human antibodies, or any other desired antigen binding fragment, and expressed in any desired host including mammalian cells, insect cells, plant cells, yeast, and bacteria. For example, techniques to recombinantly produce Fab, Fab′ F(ab)2 and F(ab′)2 fragments can also be employed using methods known in the art such as those disclosed in WO 92/22324; Mullinax et al. (1992); and Sawai et al. (1995); and Better et al. (1988) (said references incorporated by reference in their entireties).

[0280] Examples of techniques which can be used to produce single-chain Fvs and antibodies include those described in U.S. Pat. Nos. 4,946,778 and 5,258,498; Huston et al. (1991); Shu et al. (1993); and Skerra et al. (1988), which disclosures are hereby incorporated by reference in their entireties. For some uses, including in vivo use of antibodies in humans and in vitro detection assays, it may be preferable to use chimeric, humanized, or human antibodies. Methods for producing chimeric antibodies are known in the art. See e.g., Morrison, (1985); Oi et al., (1986); Gillies et al. (1989); and U.S. Pat. No. 5,807,715, which disclosures are hereby incorporated by reference in their entireties. Antibodies can be humanized using a variety of techniques including CDR-grafting (EP 0 239 400; WO 91/09967; U.S. Pat. No. 5,530,101; and 5,585,089), veneering or resurfacing, (EP 0 592 106; EP 0 519 596; Padlan, 1991; Studnicka et al., 1994; Roguska et al., 1994), and chain shuffling (U.S. Pat. No. 5,565,332), which disclosures are hereby incorporated by reference in their entireties. Human antibodies can be made by a variety of methods known in the art including phage display methods described above. See also, U.S. Pat. Nos. 4,444,887, 4,716,111, 5,545,806, and 5,814,318; WO 98/46645; WO 98/50433; WO 98/24893; WO 96/34096; WO 96/33735; and WO 91/10741 (said references incorporated by reference in their entireties).

[0281] Further included in the present invention are antibodies recombinantly fused or chemically conjugated (including both covalently and non-covalently conjugations) to a polypeptide of the present invention. The antibodies may be specific for antigens other than polypeptides of the present invention. For example, antibodies of the present invention may be recombinantly fused or conjugated to molecules useful as labels in detection assays and effector molecules such as heterologous polypeptides, drugs, or toxins. See, e.g., WO 92/08495; WO 91/14438; WO 89/12624; U.S. Pat. No. 5,314,995; and EP 0 396 387, which disclosures are hereby incorporated by reference in their entireties. Fused antibodies may also be used to target the polypeptides of the present invention to particular cell types, either in vitro or in vivo, by fusing or conjugating the polypeptides of the present invention to antibodies specific for particular cell surface receptors. Antibodies fused or conjugated to the polypeptides of the present invention may also be used in vitro immunoassays and purification methods using methods known in the art (See e.g., Harbor et al. supra; WO 93/21232; EP 0 439 095; Naramura, M. et al. 1994; U.S. Pat. No. 5,474,981; Gillies et al., 1992; Fell et al., 1991) (said references incorporated by reference in their entireties).

[0282] The present invention further includes compositions comprising the polypeptides of the present invention fused or conjugated to antibody domains other than the variable regions. For example, the polypeptides of the present invention may be fused or conjugated to an antibody Fc region, or portion thereof. The antibody portion fused to a polypeptide of the present invention may comprise the hinge region, CH1 domain, CH2 domain, and CH3 domain or any combination of whole domains or portions thereof. The polypeptides of the present invention may be fused or conjugated to the above antibody portions to increase the in vivo half-life of the polypeptides or for use in immunoassays using methods known in the art. The polypeptides may also be fused or conjugated to the above antibody portions to form multimers. For example, Fc portions fused to the polypeptides of the present invention can form dimers through disulfide bonding between the Fc portions. Higher multimeric forms can be made by fusing the polypeptides to portions of IgA and IgM. Methods for fusing or conjugating the polypeptides of the present invention to antibody portions are known in the art. See e.g., U.S. Pat. Nos. 5,336,603, 5,622,929, 5,359,046, 5,349,053, 5,447,851, 5,112,946; EP 0 307 434, EP 0 367 166; WO 96/04388, WO 91/06570; Ashkenazi et al. (1991); Zheng et al. (1995); and Vil et al. (1992) (said references incorporated by reference in their entireties).

[0283] Non-human animals or mammals, whether wild-type or transgenic, which express a different species of GENSET than the one to which antibody binding is desired, and animals which do not express GENSET (i.e. a GENSET knock out animal as described herein) are particularly useful for preparing antibodies. GENSET knock out animals will recognize all or most of the exposed regions of a GENSET protein as foreign antigens, and therefore produce antibodies with a wider array of GENSET epitopes. Moreover, smaller polypeptides with only 10 to 30 amino acids may be useful in obtaining specific binding to any one of the GENSET proteins. In addition, the humoral immune system of animals which produce a species of GENSET that resembles the antigenic sequence will preferentially recognize the differences between the animal's native GENSET species and the antigen sequence, and produce antibodies to these unique sites in the antigen sequence. Such a technique will be particularly useful in obtaining antibodies that specifically bind to any one of the GENSET proteins.

[0284] The antibodies of the invention may be labeled by, e.g., any one of the radioactive, fluorescent or enzymatic labels known in the art.

### Uses of Polynucleotides

Uses of Polynucleotides as Reagents

[0285] The polynucleotides of the present invention, particularly those described in the “Oligonucleotide primers and probes” section, may be used as reagents in isolation procedures, diagnostic assays, and forensic procedures. For example, sequences from the GENSET polynucleotides of the invention may be detectably labeled and used as probes to isolate other sequences capable of hybridizing to them. In addition, sequences from the GENSET polynucleotides of the invention may be used to design PCR primers to be used in isolation, diagnostic, or forensic procedures.

In Forensic Analyses

[0286] PCR primers may be used in forensic analyses, such as the DNA fingerprinting techniques described below. Such analyses may utilize detectable probes or primers based on the sequences of the polynucleotides of the invention. Consequently, the present invention encompasses methods of identification of an individual using the polynucleotides of the invention in forensic analyses, wherein said method includes the steps of:

[0287] a) obtaining a biological sample containing nucleic acid material from an individual;

[0288] b) obtaining an identification pattern for this individual using the polynucleotides of the invention, particularly using GENSET primers and probes;

[0289] c) comparing said identification pattern with a reference identification pattern; and

[0290] d) determining whether said identification pattern is identical to said reference identification pattern.

[0291] In one embodiment of this method, the identification pattern consists in sequences of amplicons obtained using GENSET primers as explained in the sections entitled “Forensic Matching by DNA Sequencing” and “Positive Identification by DNA Sequencing”.

[0292] In another embodiment, the identification pattern consists in unique band or dot patterns obtained using any method described in the sections entitled “Southern Blot Forensic Identification”, “Dot Blot Identification Procedure” and “Alternative “Fingerprint” Identification Technique”.

[0293] Table I provides sets of related cDNAs of the invention, e.g. sequences that represent allelic variants of a single sequence. Such variants are especially useful for the herein-described forensic analyses, and are also useful as polymorphic markers to examine, e.g. associations between the herein-discussed GENSET genes and various diseases or conditions.

Forensic Matching by DNA Sequencing

[0294] In one exemplary method, DNA samples are isolated from forensic specimens of, for example, hair, semen, blood or skin cells by conventional methods. A panel of PCR primers designed from different polynucleotides of the invention using any technique known to those skilled in the art including those described herein, is then utilized to amplify DNA of approximately 100-200 bases in length from the forensic specimen. Corresponding sequences are obtained from a test subject. Each of these identification DNAs is then sequenced using standard techniques, and a simple database comparison determines the differences, if any, between the sequences from the subject and those from the sample. Statistically significant differences between the suspect's DNA sequences and those from the sample conclusively prove a lack of identity. This lack of identity can be proven, for example, with only one sequence. Identity, on the other hand, should be demonstrated with a large number of sequences, all matching. Preferably, a minimum of 50 statistically identical sequences of 100 bases in length are used to prove identity between the suspect and the sample.

Positive Identification by DNA Sequencing

[0295] The “Forensic Matching by DNA Sequencing” technique described herein may also be used on a larger scale to provide a unique fingerprint-type identification of any individual. In this technique, primers are prepared from a large number of polynucleotides of the invention. Preferably, 20 to 50 different primers are used. These primers are used to obtain a corresponding number of PCR-generated DNA segments from the individual in question. Each of these DNA segments is sequenced. The database of sequences generated through this procedure uniquely identifies the individual from whom the sequences were obtained. The same panel of primers may then be used at any later time to absolutely correlate tissue or other biological specimen with that individual.

Southern Blot Forensic Identification

[0296] The “Positive Identification by DNA Sequencing” procedure described herein is repeated to obtain a panel of at least 10 amplified sequences from an individual and a specimen. Preferably, the panel contains at least 50 amplified sequences. More preferably, the panel contains 100 amplified sequences. In some embodiments, the panel contains 200 amplified sequences. This PCR-generated DNA is then digested with one or a combination of, preferably, four base specific restriction enzymes. Such enzymes are commercially available and known to those of skill in the art. After digestion, the resultant gene fragments are size separated in multiple duplicate wells on an agarose gel and transferred to nitrocellulose using Southern blotting techniques well known to those with skill in the art. For a review of Southern blotting see Davis et al. (1986), which disclosure is hereby incorporated by reference in its entirety.

[0297] A panel of probes based on the sequences of the polynucleotides of the invention, or fragments thereof of at least 10 bases, are radioactively or calorimetrically labeled using methods known in the art, such as nick translation or end labeling, and hybridized to the Southern blot using techniques known in the art. Preferably, the probe comprises at least 12, 15, or 17 consecutive nucleotides from the polynucleotide of the invention. More preferably, the probe comprises at least 20-30 consecutive nucleotides from the polynucleotide of the invention. In some embodiments, the probe comprises more than 30 nucleotides from the polynucleotide of the invention. In other embodiments, the probe comprises at least 40, at least 50, at least 75, at least 100, at least 150, or at least 200 consecutive nucleotides from the polynucleotide of the invention.

[0298] Preferably, at least 5 to 10 of these labeled probes are used, and more preferably at least about 20 or 30 are used to provide a unique pattern. The resultant bands appearing from the hybridization of a large sample of polynucleotide of the invention will be a unique identifier. Since the restriction enzyme cleavage will be different for every individual, the band pattern on the Southern blot will also be unique. Increasing the number of cDNA probes will provide a statistically higher level of confidence in the identification since there will be an increased number of sets of bands used for identification.

Dot Blot Identification Procedure

[0299] Another technique for identifying individuals using the polynucleotide sequences disclosed herein utilizes a dot blot hybridization technique.

[0300] Genomic DNA is isolated from nuclei of subject to be identified. Oligonucleotide probes of approximately 30 bp in length are synthesized that correspond to at least 10, preferably 50 sequences from the polynucleotide of the invention. The probes are used to hybridize to the genomic DNA through conditions known to those in the art. The oligonucleotides are end labeled with P³² using polynucleotide kinase (Pharmacia). Dot Blots are created by spotting the genomic DNA onto nitrocellulose or the like using a vacuum dot blot manifold (BioRad, Richmond Calif.). The nitrocellulose filter containing the genomic sequences is baked or UV linked to the filter, prehybridized and hybridized with labeled probe using techniques known in the art (Davis et al. 1986). The ³²P labeled DNA fragments are sequentially hybridized with successively stringent conditions to detect minimal differences between the 30 bp sequence and the DNA. Tetramethylammonium chloride is useful for identifying clones containing small numbers of nucleotide mismatches (Wood et al., 1985). A unique pattern of dots distinguishes one individual from another individual.

Alternative “Fingerprint” Identification Technique

[0301] In a representative alternative fingerprinting procedure, the probes are derived from cDNAs. Preferably, a plurality of probes having sequences from different genes are used as follows. Polynucleotides containing at least 10 consecutive bases from these sequences can be used as probes. Preferably, the probe comprises at least 12, 15, or 17 consecutive nucleotides from the polynucleotide of the invention. More preferably, the probe comprises at least 20-30 consecutive nucleotides from the polynucleotide of the invention. In some embodiments, the probe comprises more than 30 nucleotides from the polynucleotide of the invention. In other embodiments, the probe comprises at least 40, at least 50, at least 75, at least 100, at least 150, or at least 200 consecutive nucleotides from the polynucleotide of the invention.

[0302] Oligonucleotides, generally 20-mers, are prepared from a large number, e.g. 50, 100, or 200, of polynucleotides of the invention using commercially available oligonucleotide services such as Genset (Paris, France). Cell samples from the test subject are processed for DNA using techniques well known to those with skill in the art. The nucleic acid is digested with restriction enzymes such as EcoRI and XbaI. Following digestion, samples are applied to wells for electrophoresis. The procedure, as known in the art, may be modified to accommodate polyacrylamide electrophoresis, however in this example, samples containing 5 ug of DNA are loaded into wells and separated on 0.8% agarose gels. The gels are transferred onto nitrocellulose using standard Southern blotting techniques.

[0303] 10 ng of each of the oligonucleotides are pooled and end-labeled with P³². The nitrocellulose is prehybridized with blocking solution and hybridized with the labeled probes. Following hybridization and washing, the nitrocellulose filter is exposed to X-Omat AR X-ray film. The resulting hybridization pattern will be unique for each individual.

[0304] It is additionally contemplated within this example that the number of probe sequences used can be varied for additional accuracy or clarity.

To Find Corresponding Genomic DNA Sequences

[0305] The GENSET cDNAs of the invention may also be used to clone sequences located upstream of the cDNAs of the invention on the corresponding genomic DNA. Such upstream sequences may be capable of regulating gene expression, including promoter sequences, enhancer sequences, and other upstream sequences which influence transcription or translation levels. Once identified and cloned, these upstream regulatory sequences may be used in expression vectors designed to direct the expression of an inserted gene in a desired spatial, temporal, developmental, or quantitative fashion.

Use of cDNAs or Fragments Thereof to Clone Upstream Sequences from Genomic DNA

[0306] Sequences derived from polynucleotides of the inventions may be used to isolate the promoters of the corresponding genes using chromosome walking techniques. In one chromosome walking technique, which utilizes the GenomeWalker™ kit available from Clontech, five complete genomic DNA samples are each digested with a different restriction enzyme which has a 6 base recognition site and leaves a blunt end. Following digestion, oligonucleotide adapters are ligated to each end of the resulting genomic DNA fragments.

[0307] For each of the five genomic DNA libraries, a first PCR reaction is performed according to the manufacturer's instructions (which are incorporated herein by reference) using an outer adaptor primer provided in the kit and an outer gene specific primer. The gene specific primer should be selected to be specific for the polynucleotide of the invention of interest and should have a melting temperature, length, and location in the polynucleotide of the invention which is consistent with its use in PCR reactions. Each first PCR reaction contains 5 ng of genomic DNA, 5 μl of 10×Tth reaction buffer, 0.2 mM of each dNTP, 0.2 μM each of outer adaptor primer and outer gene specific primer, 1.1 mM of Mg(OAc)₂, and 1 μl of the Tth polymerase 50× mix in a total volume of 50 μl. The reaction cycle for the first PCR reaction is as follows: 1 min at 94 degrees Celsius/2 sec at 94 degree Celsius, 3 min at 72 degrees Celsius (7 cycles)/2 sec at 94 degrees Celsius, 3 min at 67 degrees Celsius (32 cycles)/5 min at 67 degrees Celsius.

[0308] The product of the first PCR reaction is diluted and used as a template for a second PCR reaction according to the manufacturer's instructions using a pair of nested primers which are located internally on the amplicon resulting from the first PCR reaction. For example, 5 μl of the reaction product of the first PCR reaction mixture may be diluted 180 times. Reactions are made in a 50 μl volume having a composition identical to that of the first PCR reaction except the nested primers are used. The first nested primer is specific for the adaptor, and is provided with the GenomeWalker™ kit. The second nested primer is specific for the particular polynucleotide of the invention for which the promoter is to be cloned and should have a melting temperature, length, and location in the polynucleotide of the invention which is consistent with its use in PCR reactions. The reaction parameters of the second PCR reaction are as follows: 1 min at 94 degrees Celsius/2 sec at 94 degrees Celsius, 3 min at 72 degrees Celsius (6 cycles)/2 sec at 94 degrees Celsius, 3 min at 67 degrees Celsius (25 cycles)/5 min at 67 degrees Celsius

[0309] The product of the second PCR reaction is purified, cloned, and sequenced using standard techniques. Alternatively, two or more human genomic DNA libraries can be constructed by using two or more restriction enzymes. The digested genomic DNA is cloned into vectors which can be converted into single stranded, circular, or linear DNA. A biotinylated oligonucleotide comprising at least 15 nucleotides from the polynucleotide of the invention sequence is hybridized to the single stranded DNA. Hybrids between the biotinylated oligonucleotide and the single stranded DNA containing the polynucleotide of the invention sequence are isolated as described herein. Thereafter, the single stranded DNA containing the polynucleotide of the invention sequence is released from the beads and converted into double stranded DNA using a primer specific for the polynucleotide of the invention sequence or a primer corresponding to a sequence included in the cloning vector. The resulting double stranded DNA is transformed into bacteria. DNAs containing the GENSET polynucleotide sequences are identified by colony PCR or colony hybridization.

Identification of Promoters in Cloned Upstream Sequences

[0310] Once the upstream genomic sequences have been cloned and sequenced as described above, prospective promoters and transcription start sites within the upstream sequences may be identified by comparing the sequences upstream of the polynucleotides of the inventions with databases containing known transcription start sites, transcription factor binding sites, or promoter sequences.

[0311] In addition, promoters in the upstream sequences may be identified using promoter reporter vectors as follows. The expression of the reporter gene will be detected when placed under the control of regulatory active polynucleotide fragments or variants of the GENSET promoter region located upstream of the first exon of the GENSET gene. Suitable promoter reporter vectors, into which the GENSET promoter sequences may be cloned include pSEAP-Basic, pSEAP-Enhancer, pβgal-Basic, pβgal-Enhancer, or pEGFP-1 Promoter Reporter vectors available from Clontech, or pGL2-basic or pGL3-basic promoterless luciferase reporter gene vector from Promega. Briefly, each of these promoter reporter vectors include multiple cloning sites positioned upstream of a reporter gene encoding a readily assayable protein such as secreted alkaline phosphatase, luciferase, beta-galactosidase, or green fluorescent protein. The sequences upstream the GENSET coding region are inserted into the cloning sites upstream of the reporter gene in both orientations and introduced into an appropriate host cell. The level of reporter protein is assayed and compared to the level obtained from a vector which lacks an insert in the cloning site. The presence of an elevated expression level in the vector containing the insert with respect to the control vector indicates the presence of a promoter in the insert. If necessary, the upstream sequences can be cloned into vectors which contain an enhancer for increasing transcription levels from weak promoter sequences. A significant level of expression above that observed with the vector lacking an insert indicates that a promoter sequence is present in the inserted upstream sequence.

[0312] Promoter sequence within the upstream genomic DNA may be further defined by site directed mutagenesis, linker scanning analysis, or other techniques familiar to those skilled in the art. For example, the boundaries of promoters may be further investigated by constructing nested 5′ and/or 3′ deletions in the upstream DNA using conventional techniques such as Exonuclease III or appropriate restriction endonuclease digestion. The resulting deletion fragments can be inserted into the promoter reporter vector to determine whether the deletion has increased, reduced or illuminated promoter activity, such as described, for example, by Coles et al. (1998), the disclosure of which is incorporated herein by reference in its entirety. In this way, the boundaries of the promoters may be defined. If desired, potential individual regulatory sites within the promoter may be identified using site directed mutagenesis or linker scanning to obliterate potential transcription factor binding sites within the promoter individually or in combination. The effects of these mutations on transcription levels may be determined by inserting the mutations into cloning sites in promoter reporter vectors. This type of assay is well known to those skilled in the art and is described in WO 97/17359, U.S. Pat. No. 5,374,544; EP 582 796; U.S. Pat. Nos. 5,698,389; 5,643,746; 5,502,176; and 5,266,488; the disclosures of which are incorporated by reference herein in their entirety.

[0313] The strength and the specificity of the promoter of each GENSET gene can be assessed through the expression levels of a detectable polynucleotide operably linked to the GENSET promoter in different types of cells and tissues. The detectable polynucleotide may be either a polynucleotide that specifically hybridizes with a predefined oligonucleotide probe, or a polynucleotide encoding a detectable protein, including a GENSET polypeptide or a fragment or a variant thereof. This type of assay is well known to those skilled in the art and is described in U.S. Pat. Nos. 5,502,176; and 5,266,488; the disclosures of which are incorporated by reference herein in their entirety. Some of the methods are discussed in more detail elsewhere in the application.

[0314] The promoters and other regulatory sequences located upstream of the polynucleotides of the inventions may be used to design expression vectors capable of directing the expression of an inserted gene in a desired spatial, temporal, developmental, or quantitative manner. A promoter capable of directing the desired spatial, temporal, developmental, and quantitative patterns may be selected using the results of the expression analysis described herein. For example, if a promoter which confers a high level of expression in muscle is desired, the promoter sequence upstream of a polynucleotide of the invention derived from an mRNA which is expressed at a high level in muscle may be used in the expression vector. Such vectors are described in more detail elsewhere in the application.

[0315] Preferably, the desired promoter is placed near multiple restriction sites to facilitate the cloning of the desired insert downstream of the promoter, such that the promoter is able to drive expression of the inserted gene. The promoter may be inserted in conventional nucleic acid backbones designed for extrachromosomal replication, integration into the host chromosomes or transient expression. Suitable backbones for the present expression vectors include retroviral backbones, backbones from eukaryotic episomes such as SV40 or Bovine Papilloma Virus, backbones from bacterial episomes, or artificial chromosomes.

[0316] Preferably, the expression vectors also include a polyA signal downstream of the multiple restriction sites for directing the polyadenylation of mRNA transcribed from the gene inserted into the expression vector.

To Find Similar Sequences

[0317] Polynucleotides of the invention may be used to isolate and/or purify nucleic acids similar thereto using any methods well known to those skilled in the art including the techniques based on hybridization or on amplification described in this section. These methods may be used to obtain the genomic DNAs which encode the mRNAs from which the GENSET cDNAs are derived, mRNAs corresponding to GENSET cDNAs, or nucleic acids which are homologous to GENSET cDNAs or fragments thereof, such as variants, species homologues or orthologs. Thus, a plurality of cDNAs similar to GENSET polynucleotides may be provided as cDNA libraries for subsequent evaluation of the encoded proteins or used in diagnostic assays as described herein. cDNAs prepared by any method described therein may be subsequently engineered to obtain nucleic acids which include desired fragments of the cDNA using conventional techniques such as subcloning, PCR, or in vitro oligonucleotide synthesis. For example, nucleic acids which include only the coding sequences may be obtained using techniques known to those skilled in the art. Similarly, nucleic acids containing any other desired fragment of the coding sequences for the encoded protein may be obtained.

[0318] Indeed, cDNAs of the present invention or fragments thereof may be used to isolate nucleic acids similar to cDNAs from a cDNA library or a genomic DNA library. Such cDNA libraries or genomic DNA libraries may be obtained from a commercial source or made using techniques familiar to those skilled in the art such as those described in PCT publication WO 00/37491, which disclosure is hereby incorporated by reference in its entirety. Examples of methods for obtaining nucleic acids similar to GENSET polynucleotides are described below.

Hybridization-Based Methods

[0319] Techniques for identifying cDNA clones in a cDNA library which hybridize to a given probe sequence are disclosed in Sambrook et al., (1989) and in Hames and Higgins (1985), the disclosures of which are incorporated herein by reference in their entireties. The same techniques may be used to isolate genomic DNAs.

[0320] Briefly, cDNA or genomic DNA clones which hybridize to the detectable probe are identified and isolated for further manipulation as follows. Any polynucleotide fragment of the invention may be used as a probe, in particular those defined in the “Oligonucleotide primers and probes” section. A probe comprising at least 10 consecutive nucleotides from a GENSET cDNA or fragment thereof is labeled with a detectable label such as a radioisotope or a fluorescent molecule. Preferably, the probe comprises at least 12, 15, or 17 consecutive nucleotides from the cDNA or fragment thereof. More preferably, the probe comprises 20 to 30 consecutive nucleotides from the cDNA or fragment thereof. In some embodiments, the probe comprises more than 30 nucleotides from the cDNA or fragment thereof.

[0321] Techniques for labeling the probe are well known and include phosphorylation with polynucleotide kinase, nick translation, in vitro transcription, and non radioactive techniques. The cDNAs or genomic DNAs in the library are transferred to a nitrocellulose or nylon filter and denatured. After blocking of non specific sites, the filter is incubated with the labeled probe for an amount of time sufficient to allow binding of the probe to cDNAs or genomic DNAs containing a sequence capable of hybridizing thereto.

[0322] By varying the stringency of the hybridization conditions used to identify cDNAs or genomic DNAs which hybridize to the detectable probe, cDNAs or genomic DNAs having different levels of identity to the probe can be identified and isolated as described below.

Stringent Conditions

[0323] “Stringent hybridization conditions” are defined as conditions in which only nucleic acids having a high level of identity to the probe are able to hybridize to said probe. These conditions may be calculated as follows:

[0324] For probes between 14 and 70 nucleotides in length the melting temperature (Tm) is calculated using the formula: Tm=81.5+16.6(log (Na+))+0.41(fraction G+C)−600/N) where N is the length of the probe.

[0325] If the hybridization is carried out in a solution containing formamide, the melting temperature may be calculated using the equation: Tm=81.5+16.6(log (Na+))+0.41(fraction G+C)−(0.63% formamide)−(600/N) where N is the length of the probe.

[0326] Prehybridization may be carried out in 6×SSC, 5× Denhardt's reagent, 0.5% SDS, 100 μg denatured fragmented salmon sperm DNA or 6×SSC, 5× Denhardt's reagent, 0.5% SDS, 100 μg denatured fragmented salmon sperm DNA, 50% formamide. The formulas for SSC and Denhardt's solutions are listed in Sambrook et al., 1986.

[0327] Hybridization is conducted by adding the detectable probe to the prehybridization solutions listed above. Where the probe comprises double stranded DNA, it is denatured before addition to the hybridization solution. The filter is contacted with the hybridization solution for a sufficient period of time to allow the probe to hybridize to nucleic acids containing sequences complementary thereto or homologous thereto. For probes over 200 nucleotides in length, the hybridization may be carried out at 15-25° C. below the Tm. For shorter probes, such as oligonucleotide probes, the hybridization may be conducted at 15-25° C. below the Tm. Preferably, for hybridizations in 6×SSC, the hybridization is conducted at approximately 68° C. Preferably, for hybridizations in 50% formamide containing solutions, the hybridization is conducted at approximately 42° C.

[0328] Following hybridization, the filter is washed in 2×SSC, 0.1% SDS at room temperature for 15 minutes. The filter is then washed with 0.1×SSC, 0.5% SDS at room temperature for 30 minutes to 1 hour. Thereafter, the solution is washed at the hybridization temperature in 0.1×SSC, 0.5% SDS. A final wash is conducted in 0.1×SSC at room temperature.

[0329] Nucleic acids which have hybridized to the probe are identified by autoradiography or other conventional techniques.

Low and Moderate Conditions

[0330] Changes in the stringency of hybridization and signal detection are primarily accomplished through the manipulation of formamide concentration (lower percentages of formamide result in lowered stringency); salt conditions, or temperature. The above procedure may thus be modified to identify nucleic acids having decreasing levels of identity to the probe sequence. For example, the hybridization temperature may be decreased in increments of 5° C. from 68° C. to 42° C. in a hybridization buffer having a sodium concentration of approximately 1M. Following hybridization, the filter may be washed with 2×SSC, 0.5% SDS at the temperature of hybridization. These conditions are considered to be “moderate” conditions above 50° C. and “low” conditions below 50° C. Alternatively, the hybridization may be carried out in buffers, such as 6×SSC, containing formamide at a temperature of 42° C. In this case, the concentration of formamide in the hybridization buffer may be reduced in 5% increments from 50% to 0% to identify clones having decreasing levels of identity to the probe. Following hybridization, the filter may be washed with 6×SSC, 0.5% SDS at 50° C. These conditions are considered to be “moderate” conditions above 25% formamide and “low” conditions below 25% formamide. cDNAs or genomic DNAs which have hybridized to the probe are identified by autoradiography or other conventional techniques.

[0331] Note that variations in the above conditions may be accomplished through the inclusion and/or substitution of alternate blocking reagents used to suppress background in hybridization experiments. Typical blocking reagents include Denhardt's reagent, BLOTTO, heparin, denatured salmon sperm DNA, and commercially available proprietary formulations. The inclusion of specific blocking reagents may require modification of the hybridization conditions described above, due to problems with compatibility.

[0332] Consequently, the present invention encompasses methods of isolating nucleic acids similar to the polynucleotides of the invention, comprising the steps of:

[0333] a) contacting a collection of cDNA or genomic DNA molecules with a detectable probe comprising at least 12, 15, 18, 20, 23, 25, 28, 30, 35, 40 or 50 consecutive nucleotides of a sequence selected from the group consisting of the sequences of SEQ ID NOs: 1-169, 339-455, 561-784, the sequences of clones inserts of the deposited clone pool and sequences complementary thereto under stringent, moderate or low conditions which permit said probe to hybridize to at least a cDNA or genomic DNA molecule in said collection;

[0334] b) identifying said cDNA or genomic DNA molecule which hybridizes to said detectable probe; and

[0335] c) isolating said cDNA or genomic DNA molecule which hybridized to said probe.

PCR-Based Methods

[0336] In addition to the above described methods, other protocols are available to obtain homologous cDNAs using GENSET cDNA of the present invention or fragment thereof as outlined in the following paragraphs.

[0337] cDNAs may be prepared by obtaining mRNA from the tissue, cell, or organism of interest using mRNA preparation procedures utilizing polyA selection procedures or other techniques known to those skilled in the art. A first primer capable of hybridizing to the polyA tail of the mRNA is hybridized to the mRNA and a reverse transcription reaction is performed to generate a first cDNA strand.

[0338] The term “capable of hybridizing to the polyA tail of said mRNA” refers to and embraces all primers containing stretches of thymidine residues, so-called oligo(dT) primers, that hybridize to the 3′ end of eukaryotic poly(A)+ mRNAs to prime the synthesis of a first cDNA strand. Techniques for generating said oligo (dT) primers and hybridizing them to mRNA to subsequently prime the reverse transcription of said hybridized mRNA to generate a first cDNA strand are well known to those skilled in the art and are described in Current Protocols in Molecular Biology, John Wiley and Sons, Inc. 1997 and Sambrook et al., 1989. Preferably, said oligo (dT) primers are present in a large excess in order to allow the hybridization of all mRNA 3′ ends to at least one oligo (dT) molecule. The priming and reverse transcription steps are preferably performed between 37° C. and 55° C. depending on the type of reverse transcriptase used. Preferred oligo(dT) primers for priming reverse transcription of mRNAs are oligonucleotides containing a stretch of thymidine residues of sufficient length to hybridize specifically to the polyA tail of mRNAs, preferably of 12 to 18 thymidine residues in length. More preferably, such oligo(T) primers comprise an additional sequence upstream of the poly(dT) stretch in order to allow the addition of a given sequence to the 5′ end of all first cDNA strands which may then be used to facilitate subsequent manipulation of the cDNA. Preferably, this added sequence is 8 to 60 residues in length. For instance, the addition of a restriction site in 5′ of cDNAs facilitates subcloning of the obtained cDNA. Alternatively, such an added 5′ end may also be used to design primers of PCR to specifically amplify cDNA clones of interest.

[0339] The first cDNA strand is then hybridized to a second primer. Any polynucleotide fragment of the invention may be used, and in particular those described in the “Oligonucleotide primers and probes” section. This second primer contains at least 10 consecutive nucleotides of a polynucleotide of the invention. Preferably, the primer comprises at least 10, 12, 15, 17, 18, 20, 23, 25, or 28 consecutive nucleotides of a polynucleotide of the invention. In some embodiments, the primer comprises more than 30 nucleotides of a polynucleotide of the invention. If it is desired to obtain cDNAs containing the full protein coding sequence, including the authentic translation initiation site, the second primer used contains sequences located upstream of the translation initiation site. The second primer is extended to generate a second cDNA strand complementary to the first cDNA strand. Alternatively, RT-PCR may be performed as described above using primers from both ends of the cDNA to be obtained.

[0340] The double stranded cDNAs made using the methods described above are isolated and cloned. The cDNAs may be cloned into vectors such as plasmids or viral vectors capable of replicating in an appropriate host cell. For example, the host cell may be a bacterial, mammalian, avian, or insect cell.

[0341] Techniques for isolating mRNA, reverse transcribing a primer hybridized to mRNA to generate a first cDNA strand, extending a primer to make a second cDNA strand complementary to the first cDNA strand, isolating the double stranded cDNA and cloning the double stranded cDNA are well known to those skilled in the art and are described in Current Protocols in Molecular Biology, John Wiley & Sons, Inc. 1997 and Sambrook et al., 1989.

[0342] Consequently, the present invention encompasses methods of making cDNAs. In a first embodiment, the method of making a cDNA comprises the steps of

[0343] a) contacting a collection of mRNA molecules from human cells with a primer comprising at least 12, 15, 18, 20, 23, 25, 28, 30, 35, 40, or 50 consecutive nucleotides of a sequence selected from the group consisting of the sequences complementary to SEQ ID NOs:1-169, 339-455, 561-784 and sequences complementary to a clone insert of the deposited clone pool;

[0344] b) hybridizing said primer to an mRNA in said collection;

[0345] c) reverse transcribing said hybridized primer to make a first cDNA strand from said mRNA;

[0346] d) making a second cDNA strand complementary to said first cDNA strand; and

[0347] e) isolating the resulting cDNA comprising said first cDNA strand and said second cDNA strand.

[0348] Another embodiment of the present invention is a purified cDNA obtainable by the method of the preceding paragraph. In one aspect of this embodiment, the cDNA encodes at least a portion of a human polypeptide.

[0349] In a second embodiment, the method of making a cDNA comprises the steps of

[0350] a) contacting a collection of mRNA molecules from human cells with a first primer capable of hybridizing to the polyA tail of said mRNA;

[0351] b) hybridizing said first primer to said polyA tail;

[0352] c) reverse transcribing said mRNA to make a first cDNA strand;

[0353] d) making a second cDNA strand complementary to said first cDNA strand using at least one primer comprising at least 12, 15, 18, 20, 23, 25, 28, 30, 35, 40, or 50 consecutive nucleotides of a sequence selected from the group consisting of SEQ ID NOs:1-169, 339-455, 561-784 and sequences of clone inserts of the deposited clone pool; and

[0354] e) isolating the resulting cDNA comprising said first cDNA strand and said second cDNA strand.

[0355] In another aspect of this method the second cDNA strand is made by

[0356] a) contacting said first cDNA strand with a second primer comprising at least 12, 15, 18, 20, 23, 25, 28, 30, 35, 40, or 50 consecutive nucleotides of a sequence selected from the group consisting of SEQ ID NOs:1-169, 339-455, 561-784 and sequences of clone inserts of the deposited clone pool, and a third primer which sequence is fully included within the sequence of said first primer;

[0357] b) performing a first polymerase chain reaction with said second and third primers to generate a first PCR product;

[0358] c) contacting said first PCR product with a fourth primer, comprising at least 12, 15, 18, 20, 23, 25, 28,30, 35, 40, or 50 consecutive nucleotides of said sequence selected from the group consisting of SEQ ID NOs:1-169, 339-455, 561-784 and sequences of clone inserts of the deposited clone pool, and a fifth primer, which sequence is fully included within the sequence of said third primer, wherein said fourth and fifth hybridize to sequences within said first PCR product; and

[0359] d) performing a second polymerase chain reaction, thereby generating a second PCR product.

[0360] Alternatively, the second cDNA strand may be made by contacting said first cDNA strand with a second primer comprising at least 12, 15, 18, 20, 23, 25, 28, 30, 35, 40, or 50 consecutive nucleotides of a sequence selected from the group consisting of SEQ ID NOs:1-169, 339-455, 561-784 and sequences of clone inserts of the deposited clone pool, and a third primer which sequence is fully included within the sequence of said first primer and performing a polymerase chain reaction with said second and third primers to generate said second cDNA strand.

[0361] Alternatively, the second cDNA strand may be made by:

[0362] a) contacting said first cDNA strand with a second primer comprising at least 12, 15, 18, 20, 23, 25, 28, 30, 35, 40, or 50 consecutive nucleotides of a sequence selected from the group consisting of SEQ ID NOs:1-169, 339-455, 561-784 and sequences of clone inserts of the deposited clone pool;

[0363] b) hybridizing said second primer to said first strand cDNA; and

[0364] c) extending said hybridized second primer to generate said second cDNA strand.

[0365] Another embodiment of the present invention is a purified cDNA obtainable by a method of making a cDNA of the invention. In one aspect of this embodiment, said cDNA encodes at least a portion of a human polypeptide.

Other Protocols

[0366] Alternatively, other procedures may be used for obtaining homologous cDNAs. In one approach, cDNAs are prepared from mRNA and cloned into double stranded phagemids as follows. The cDNA library in the double stranded phagemids is then rendered single stranded by treatment with an endonuclease, such as the Gene II product of the phage F1 and an exonuclease (Chang et al., 1993, which disclosure is hereby incorporated by reference in its entirety). A biotinylated oligonucleotide comprising the sequence of a fragment of a known GENSET cDNA, genomic DNA or fragment thereof is hybridized to the single stranded phagemids. Preferably, the fragment comprises at least 10, 12, 15, 17, 18, 20, 23, 25, or 28 consecutive nucleotides of a sequence selected from the group consisting of the sequences of SEQ ID NOs:1-169, 339-455, 561-784 and sequences of clone inserts of the deposited clone pool.

[0367] Hybrids between the biotinylated oligonucleotide and phagemids are isolated by incubating the hybrids with streptavidin coated paramagnetic beads and retrieving the beads with a magnet (Fry et al, 1992, which disclosure is hereby incorporated by reference in its entirety). Thereafter, the resulting phagemids are released from the beads and converted into double stranded DNA using a primer specific for the GENSET cDNA or fragment used to design the biotinylated oligonucleotide. Alternatively, protocols such as the Gene Trapper kit (Gibco BRL), which disclosure is which disclosure is hereby incorporated by reference in its entirety, may be used. The resulting double stranded DNA is transformed into bacteria. Homologous cDNAs to the GENSET cDNA or fragment thereof sequence are identified by colony PCR or colony hybridization.

As a Chromosome Marker

[0368] Chromosomal localization of the cDNA of the present invention were determined using information from public and proprietary databases. Table II lists the putative chromosomal location of the polynucleotides of the present invention. Column one lists the sequence identification number with the corresponding chromosomal location listed in column two. Thus, the present invention also relates to methods and compositions using the chromosomal location of the polynucleotides of the invention to construct a human high resolution map or to identify a given chromosome in a sample using any techniques known to those skilled in the art including those disclosed below.

[0369] GENSET polynucleotides may also be mapped to their chromosomal locations using any methods or techniques known to those skilled in the art including radiation hybrid (RH) mapping, PCR-based mapping and Fluorescence in situ hybridization (FISH) mapping described below.

Radiation Hybrid Mapping

[0370] Radiation hybrid (RH) mapping is a somatic cell genetic approach that can be used for high resolution mapping of the human genome. In this approach, cell lines containing one or more human chromosomes are lethally irradiated, breaking each chromosome into fragments whose size depends on the radiation dose. These fragments are rescued by fusion with cultured rodent cells, yielding subclones containing different fragments of the human genome. This technique is described by Benham et al. (1989) and Cox et al., (1990), which disclosures are hereby incorporated by reference in their entireties. The random and independent nature of the subclones permits efficient mapping of any human genome marker. Human DNA isolated from a panel of 80-100 cell lines provides a mapping reagent for ordering GENSET cDNAs or genomic DNAs. In this approach, the frequency of breakage between markers is used to measure distance, allowing construction of fine resolution maps as has been done using conventional ESTs (Schuler et al., 1996), which disclosure is hereby incorporated by reference in its entirety.

[0371] RH mapping has been used to generate a high-resolution whole genome radiation hybrid map of human chromosome 17q22-q25.3 across the genes for growth hormone (GH) and thymidine kinase (TK) (Foster et al., 1996), the region surrounding the Gorlin syndrome gene (Obermayr et al., 1996), 60 loci covering the entire short arm of chromosome 12 (Raeymaekers et al., 1995), the region of human chromosome 22 containing the neurofibromatosis type 2 locus (Frazer et al., 1992) and 13 loci on the long arm of chromosome 5 (Warrington et al., 1991), which disclosures are hereby incorporated by reference in their entireties.

Mapping of cDNAs to Human Chromosomes using PCR Techniques

[0372] GENSET cDNAs and genomic DNAs may be assigned to human chromosomes using PCR based methodologies. In such approaches, oligonucleotide primer pairs are designed from the cDNA sequence to minimize the chance of amplifying through an intron. Preferably, the oligonucleotide primers are 18-23 bp in length and are designed for PCR amplification. The creation of PCR primers from known sequences is well known to those with skill in the art. For a review of PCR technology see Erlich (1992), which disclosure is hereby incorporated by reference in its entirety.

[0373] The primers are used in polymerase chain reactions (PCR) to amplify templates from total human genomic DNA. PCR conditions are as follows: 60 ng of genomic DNA is used as a template for PCR with 80 ng of each oligonucleotide primer, 0.6 unit of Taq polymerase, and 1 uCu of a ³²P-labeled deoxycytidine triphosphate. The PCR is performed in a microplate thermocycler (Techne) under the following conditions: 30 cycles of 94 degrees Celsius, 1.4 min; 55 degrees Celsius, 2 min; and 72 degrees Celsius, 2 min; with a final extension at 72 degrees Celsius for 10 min. The amplified products are analyzed on a 6% polyacrylamide sequencing gel and visualized by autoradiography. If the length of the resulting PCR product is identical to the distance between the ends of the primer sequences in the cDNA from which the primers are derived, then the PCR reaction is repeated with DNA templates from two panels of human-rodent somatic cell hybrids, BIOS PCRable DNA (BIOS Corporation) and NIGMS Human-Rodent Somatic Cell Hybrid Mapping Panel Number 1 (NIGMS, Camden, N.J.).

[0374] PCR is used to screen a series of somatic cell hybrid cell lines containing defined sets of human chromosomes for the presence of a given cDNA or genomic DNA. DNA is isolated from the somatic hybrids and used as starting templates for PCR reactions using the primer pairs from the GENSET cDNAs or genomic DNAs. Only those somatic cell hybrids with chromosomes containing the human gene corresponding to the GENSET cDNA or genomic DNA will yield an amplified fragment. The GENSET cDNAs or genomic DNAs are assigned to a chromosome by analysis of the segregation pattern of PCR products from the somatic hybrid DNA templates. The single human chromosome present in all cell hybrids that give rise to an amplified fragment is the chromosome containing that GENSET cDNA or genomic DNA. For a review of techniques and analysis of results from somatic cell gene mapping experiments, see Ledbetter et al., (1990), which disclosure is hereby incorporated by reference in its entirety.

Mapping of cDNAs to Chromosomes Using Fluorescence in situ Hybridization

[0375] Fluorescence in situ hybridization (FISH) allows the GENSET cDNA or genomic DNA to be mapped to a particular location on a given chromosome. The chromosomes to be used for fluorescence in situ hybridization techniques may be obtained from a variety of sources including cell cultures, tissues, or whole blood.

[0376] In a preferred embodiment, chromosomal localization of a GENSET cDNA or genomic DNA is obtained by FISH as described by Cherif et al. (1990), which disclosure is hereby incorporated by reference in its entirety. Metaphase chromosomes are prepared from phytohemagglutinin (PHA)-stimulated blood cell donors. PHA-stimulated lymphocytes from healthy males are cultured for 72 h in RPMI-1640 medium. For synchronization, methotrexate (10 uM) is added for 17 h, followed by addition of 5-bromodeoxyuridine (5-BudR, 0.1 mM) for 6 h. Colcemid (1 ug/ml) is added for the last 15 min before harvesting the cells. Cells are collected, washed in RPMI, incubated with a hypotonic solution of KCl (75 mM) at 37 degrees Celsius for 15 min and fixed in three changes of methanol:acetic acid (3:1). The cell suspension is dropped onto a glass slide and air dried. The GENSET cDNA or genomic DNA is labeled with biotin-16 dUTP by nick translation according to the manufacturer's instructions (Bethesda Research Laboratories, Bethesda, Md.), purified using a Sephadex G-50 column (Pharmacia, Upssala, Sweden) and precipitated. Just prior to hybridization, the DNA pellet is dissolved in hybridization buffer (50% formamide, 2×SSC, 10% dextran sulfate, 1 mg/ml sonicated salmon sperm DNA, pH 7) and the probe is denatured at 70 degrees Celsius for 5-10 min.

[0377] Slides kept at −20 degrees Celsius are treated for 1 h at 37 degrees Celsius with RNase A (100 ug/ml), rinsed three times in 2×SSC and dehydrated in an ethanol series. Chromosome preparations are denatured in 70% formamide, 2×SSC for 2 min at 70 degrees Celsius, then dehydrated at 4 degrees Celsius. The slides are treated with proteinase K (10 ug/100 ml in 20 mM Tris-HCl, 2 mM CaCl₂) at 37 degrees Celsius for 8 min and dehydrated. The hybridization mixture containing the probe is placed on the slide, covered with a coverslip, sealed with rubber cement and incubated overnight in a humid chamber at 37 degrees Celsius. After hybridization and post-hybridization washes, the biotinylated probe is detected by avidin-FITC and amplified with additional layers of biotinylated goat anti-avidin and avidin-FITC. For chromosomal localization, fluorescent R-bands are obtained as previously described (Cherif et al., 1990). The slides are observed under a LEICA fluorescence microscope (DMRXA). Chromosomes are counterstained with propidium iodide and the fluorescent signal of the probe appears as two symmetrical yellow-green spots on both chromatids of the fluorescent R-band chromosome (red). Thus, a particular GENSET cDNA or genomic DNA may be localized to a particular cytogenetic R-band on a given chromosome.

Use of cDNAs to Construct or Expand Chromosome Maps

[0378] Once the GENSET cDNAs or genomic DNAs have been assigned to particular chromosomes using any technique known to those skilled in the art those skilled in the art, particularly those described herein, they may be utilized to construct a high resolution map of the chromosomes on which they are located or to identify the chromosomes in a sample.

[0379] Chromosome mapping involves assigning a given unique sequence to a particular chromosome as described above. Once the unique sequence has been mapped to a given chromosome, it is ordered relative to other unique sequences located on the same chromosome. One approach to chromosome mapping utilizes a series of yeast artificial chromosomes (YACs) bearing several thousand long inserts derived from the chromosomes of the organism from which the GENSET cDNAs or genomic DNAs are obtained. This approach is described in Nagaraja et al. (1997), which disclosure is hereby incorporated by reference in its entirety. Briefly, in this approach each chromosome is broken into overlapping pieces which are inserted into the YAC vector. The YAC inserts are screened using PCR or other methods to determine whether they include the GENSET cDNA or genomic DNA whose position is to be determined. Once an insert has been found which includes the GENSET cDNA or genomic DNA, the insert can be analyzed by PCR or other methods to determine whether the insert also contains other sequences known to be on the chromosome or in the region from which the GENSET cDNA or genomic DNA was derived. This process can be repeated for each insert in the YAC library to determine the location of each of the GENSET cDNA or genomic DNA relative to one another and to other known chromosomal markers. In this way, a high resolution map of the distribution of numerous unique markers along each of the organisms chromosomes may be obtained.

Identification of Genes Associated with Hereditary Diseases or Drug Response

[0380] This example illustrates an approach useful for the association of GENSET cDNAs or genomic DNAs with particular phenotypic characteristics. In this example, a particular GENSET cDNA or genomic DNA is used as a test probe to associate that GENSET cDNA or genomic DNA with a particular phenotypic characteristic.

[0381] GENSET cDNAs or genomic DNAs are mapped to a particular location on a human chromosome using techniques such as those described herein or other techniques known in the art. A search of Mendelian Inheritance in Man (V. McKusick, Mendelian Inheritance in Man; available on line through Johns Hopkins University Welch Medical Library) reveals the region of the human chromosome which contains the GENSET cDNA or genomic DNA to be a very gene rich region containing several known genes and several diseases or phenotypes for which genes have not been identified. The gene corresponding to this GENSET cDNA or genomic DNA thus becomes an immediate candidate for each of these genetic diseases.

[0382] Cells from patients with these diseases or phenotypes are isolated and expanded in culture. PCR primers from the GENSET cDNA or genomic DNA are used to screen genomic DNA, mRNA or cDNA obtained from the patients. GENSET cDNAs or genomic DNAs that are not amplified in he patients can be positively associated with a particular disease by further analysis. Alternatively, the PCR analysis may yield fragments of different lengths when the samples are derived from an individual having the phenotype associated with the disease than when the sample is derived from a healthy individual, indicating that the gene containing the cDNA may be responsible for the genetic disease.

Uses of Polynucleotides in Recombinant Vectors

[0383] The present invention also relates to recombinant vectors including the isolated polynucleotides of the present invention, and to host cells recombinant for a polynucleotide of the invention, such as the above vectors, as well as to methods of making such vectors and host cells and for using them for production of GENSET polypeptides by recombinant techniques.

Recombinant Vectors

[0384] The term “vector” is used herein to designate either a circular or a linear DNA or RNA molecule, which is either double-stranded or single-stranded, and which comprise at least one polynucleotide of interest that is sought to be transferred in a cell host or in a unicellular or multicellular host organism. The present invention encompasses a family of recombinant vectors that comprise a regulatory polynucleotide and/or a coding polynucleotide derived from either the GENSET genomic sequence or the cDNA sequence. Generally, a recombinant vector of the invention may comprise any of the polynucleotides described herein, including regulatory sequences, coding sequences and polynucleotide constructs, as well as any GENSET primer or probe as defined herein.

[0385] In a first preferred embodiment, a recombinant vector of the invention is used to amplify the inserted polynucleotide derived from a GENSET genomic sequence or a GENSET cDNA, for example any cDNA selected from the group consisting of sequences of SEQ ID NOs:1-169, 339-455, 561-784, sequences of clone inserts of the deposited clone pool, variants and fragments thereof in a suitable cell host, this polynucleotide being amplified at every time that the recombinant vector replicates.

[0386] A second preferred embodiment of the recombinant vectors according to the invention comprises expression vectors comprising either a regulatory polynucleotide or a coding nucleic acid of the invention, or both. Within certain embodiments, expression vectors are employed to express a GENSET polypeptide which can be then purified and, for example be used in ligand screening assays or as an immunogen in order to raise specific antibodies directed against the GENSET protein. In other embodiments, the expression vectors are used for constructing transgenic animals and also for gene therapy. Expression requires that appropriate signals are provided in the vectors, said signals including various regulatory elements, such as enhancers/promoters from both viral and mammalian sources that drive expression of the genes of interest in host cells. Dominant drug selection markers for establishing permanent, stable cell clones expressing the products are generally included in the expression vectors of the invention, as they are elements that link expression of the drug selection markers to expression of the polypeptide.

[0387] More particularly, the present invention relates to expression vectors which include nucleic acids encoding a GENSET protein, preferably a GENSET protein with an amino acid sequence selected from the group consisting of sequences of SEQ ID NOs:170-338, 456-560, 785-918, sequences of polypeptides encoded by the clone inserts of the deposited clone pool, variants and fragments thereof. The polynucleotides of the present invention may be used to express an encoded protein in a host organism to produce a beneficial effect. In such procedures, the encoded protein may be transiently expressed in the host organism or stably expressed in the host organism. The encoded protein may have any of the activities described herein. The encoded protein may be a protein which the host organism lacks or, alternatively, the encoded protein may augment the existing levels of the protein in the host organism.

[0388] Some of the elements which can be found in the vectors of the present invention are described in further detail in the following sections.

General Features of the Expression Vectors of the Invention

[0389] A recombinant vector according to the invention comprises, but is not limited to, a YAC (Yeast Artificial Chromosome), a BAC (Bacterial Artificial Chromosome), a phage, a phagemid, a cosmid, a plasmid or even a linear DNA molecule which may comprise a chromosomal, non-chromosomal, semi-synthetic and synthetic DNA. Such a recombinant vector can comprise a transcriptional unit comprising an assembly of:

[0390] (1) a genetic element or elements having a regulatory role in gene expression, for example promoters or enhancers. Enhancers are cis-acting elements of DNA, usually from about 10 to 300 bp in length that act on the promoter to increase the transcription.

[0391] (2) a structural or coding sequence which is transcribed into mRNA and eventually translated into a polypeptide, said structural or coding sequence being operably linked to the regulatory elements described in (1); and

[0392] (3) appropriate transcription initiation and termination sequences. Structural units intended for use in yeast or eukaryotic expression systems preferably include a leader sequence enabling extracellular secretion of translated protein by a host cell. Alternatively, when a recombinant protein is expressed without a leader or transport sequence, it may include a N-terminal residue. This residue may or may not be subsequently cleaved from the expressed recombinant protein to provide a final product.

[0393] Generally, recombinant expression vectors will include origins of replication, selectable markers permitting transformation of the host cell, and a promoter derived from a highly expressed gene to direct transcription of a downstream structural sequence. The heterologous structural sequence is assembled in appropriate phase with translation initiation and termination sequences, and preferably a leader sequence capable of directing secretion of the translated protein into the periplasmic space or the extracellular medium. In a specific embodiment wherein the vector is adapted for transfecting and expressing desired sequences in mammalian host cells, preferred vectors will comprise an origin of replication in the desired host, a suitable promoter and enhancer, and also any necessary ribosome binding sites, polyadenylation signals, splice donor and acceptor sites, transcriptional termination sequences, and 5′-flanking non-transcribed sequences. DNA sequences derived from the SV40 viral genome, for example SV40 origin, early promoter, enhancer, splice and polyadenylation signals may be used to provide the required non-transcribed genetic elements.

[0394] The in vivo expression of a GENSET polypeptide of the present invention may be useful in order to correct a genetic defect related to the expression of the native gene in a host organism, for the treatment or prevention of any disease or condition that can be treated or prevented by increasing the level of GENSET polypeptide expression, or to the production of a biologically inactive GENSET protein. Consequently, the present invention also comprises recombinant expression vectors mainly designed for the in vivo production of a GENSET polypeptide the present invention by the introduction of the appropriate genetic material in the organism or the patient to be treated. This genetic material may be introduced in vitro in a cell that has been previously extracted from the organism, the modified cell being subsequently reintroduced in the said organism, directly in vivo into the appropriate tissue.

Regulatory Elements

[0395] The suitable promoter regions used in the expression vectors according to the present invention are chosen taking into account the cell host in which the heterologous gene has to be expressed. The particular promoter employed to control the expression of a nucleic acid sequence of interest is not believed to be important, so long as it is capable of directing the expression of the nucleic acid in the targeted cell. Thus, where a human cell is targeted, it is preferable to position the nucleic acid coding region adjacent to and under the control of a promoter that is capable of being expressed in a human cell, such as, for example, a human or a viral promoter.

[0396] A suitable promoter may be heterologous with respect to the nucleic acid for which it controls the expression or alternatively can be endogenous to the native polynucleotide containing the coding sequence to be expressed. Additionally, the promoter is generally heterologous with respect to the recombinant vector sequences within which the construct promoter/coding sequence has been inserted.

[0397] Promoter regions can be selected from any desired gene using, for example, CAT (chloramphenicol transferase) vectors and more preferably pKK232-8 and pCM7 vectors.

[0398] Preferred bacterial promoters are the LacI, LacZ, the T3 or T7 bacteriophage RNA polymerase promoters, the gpt, lambda PR, PL and trp promoters (EP 0036776), the polyhedrin promoter, or the p10 protein promoter from baculovirus (Kit Novagen), (Smith et al., 1983; O'Reilly et al., 1992; which disclosures are hereby incorporated by reference in their entireties), the lambda PR promoter or also the trc promoter.

[0399] Eukaryotic promoters include CMV immediate early, HSV thymidine kinase, early and late SV40, LTRs from retrovirus, and mouse metallothionein-L. Selection of a convenient vector and promoter is well within the level of ordinary skill in the art. The choice of a promoter is well within the ability of a person skilled in the field of genetic engineering. For example, one may refer to the book of Sambrook et al., (1989) or also to the procedures described by Fuller et al., (1996), which disclosures are hereby incorporated by reference in their entireties.

Other Regulatory Elements

[0400] Where a cDNA insert is employed, one will typically desire to include a polyadenylation signal to effect proper polyadenylation of the gene transcript. The nature of the polyadenylation signal is not believed to be crucial to the successful practice of the invention, and any such sequence may be employed such as human growth hormone and SV40 polyadenylation signals. Also contemplated as an element of the expression cassette is a terminator. These elements can serve to enhance message levels and to minimize read through from the cassette into other sequences.

Selectable Markers

[0401] Selectable markers confer an identifiable change to the cell permitting easy identification of cells containing the expression construct. The selectable marker genes for selection of transformed host cells are preferably dihydrofolate reductase or neomycin resistance for eukaryotic cell culture, TRP1 for S. cerevisiae or tetracycline, rifampicin or ampicillin resistance in E. Coli, or levan saccharase for mycobacteria, this latter marker being a negative selection marker.

Preferred Vectors

Bacterial Vectors

[0402] As a representative but non-limiting example, useful expression vectors for bacterial use can comprise a selectable marker and a bacterial origin of replication derived from commercially available plasmids comprising genetic elements of pBR322 (ATCC 37017). Such commercial vectors include, for example, pKK223-3 (Pharmacia, Uppsala, Sweden), and pGEM1 (Promega Biotec, Madison, Wis., USA).

[0403] Large numbers of other suitable vectors are known to those of skill in the art, and commercially available, such as the following bacterial vectors: pQE70, pQE60, pQE-9 (Qiagen), pbs, pD10, phagescript, psiX174, pbluescript SK, pbsks, pNH8A, pNH16A, pNH18A, pNH46A (Stratagene); ptrc99a, pKK223-3, pKK233-3, pDR540, pRIT5 (Pharmacia); pWLNEO, pSV2CAT, pOG44, pXT1, pSG (Stratagene); pSVK3, pBPV, pMSG, pSVL (Pharmacia); pQE-30 (QIAexpress).

Bacteriophage Vectors

[0404] The P1 bacteriophage vector may contain large inserts ranging from about 80 to about 100 kb. The construction of P1 bacteriophage vectors such as p158 or p158/neo8 are notably described by Sternberg (1992, 1994), which disclosure is hereby incorporated by reference in its entirety. Recombinant P1 clones comprising GENSET nucleotide sequences may be designed for inserting large polynucleotides of more than 40 kb (See Linton et al., 1993), which disclosure is hereby incorporated by reference in its entirety. To generate P1 DNA for transgenic experiments, a preferred protocol is the protocol described by McCormick et al. (1994), which disclosure is hereby incorporated by reference in its entirety. Briefly, E. coli (preferably strain NS3529) harboring the P1 plasmid are grown overnight in a suitable broth medium containing 25 μg/ml of kanamycin. The P1 DNA is prepared from the E. coli by alkaline lysis using the Qiagen Plasmid Maxi kit (Qiagen, Chatsworth, Calif., USA), according to the manufacturer's instructions. The P1 DNA is purified from the bacterial lysate on two Qiagen-tip 500 columns, using the washing and elution buffers contained in the kit. A phenol/chloroform extraction is then performed before precipitating the DNA with 70% ethanol. After solubilizing the DNA in TE (10 mM Tris-HCl, pH 7.4, 1 mM EDTA), the concentration of the DNA is assessed by spectrophotometry.

[0405] When the goal is to express a P1 clone comprising GENSET polypeptide-encoding nucleotide sequences in a transgenic animal, typically in transgenic mice, it is desirable to remove vector sequences from the P1 DNA fragment, for example by cleaving the P1 DNA at rare-cutting sites within the P1 polylinker (SfiI, NotI or SalI). The P1 insert is then purified from vector sequences on a pulsed-field agarose gel, using methods similar to those originally reported for the isolation of DNA from YACs (See e. g., Schedl et al., 1993a; Peterson et al., 1993), which disclosures are hereby incorporated by reference in their entireties. At this stage, the resulting purified insert DNA can be concentrated, if necessary, on a Millipore Ultrafree-MC Filter Unit (Millipore, Bedford, Mass., USA—30,000 molecular weight limit) and then dialyzed against microinjection buffer (10 mM Tris-HCl, pH 7.4; 250 μM EDTA) containing 100 mM NaCl, 30 μM spermine, 70 μM spermidine on a microdyalisis membrane (type VS, 0.025 μM from Millipore). The intactness of the purified P1 DNA insert is assessed by electrophoresis on 1% agarose (Sea Kem GTG; FMC Bio-products) pulse-field gel and staining with ethidium bromide.

Viral Vectors

[0406] In one specific embodiment, the vector is derived from an adenovirus. Preferred adenovirus vectors according to the invention are those described by Feldman and Steg (1996), or Ohno et al., (1994), which disclosures are hereby incorporated by reference in their entireties. Another preferred recombinant adenovirus according to this specific embodiment of the present invention is the human adenovirus type 2 or 5 (Ad 2 or Ad 5) or an adenovirus of animal origin (French patent application No. FR-93.05954), which disclosure is hereby incorporated by reference in its entirety.

[0407] Retrovirus vectors and adeno-associated virus vectors are generally understood to be the recombinant gene delivery systems of choice for the transfer of exogenous polynucleotides in vivo, particularly to mammals, including humans. These vectors provide efficient delivery of genes into cells, and the transferred nucleic acids are stably integrated into the chromosomal DNA of the host. Particularly preferred retroviruses for the preparation or construction of retroviral in vitro or in vitro gene delivery vehicles of the present invention include retroviruses selected from the group consisting of Mink-Cell Focus Inducing Virus, Murine Sarcoma Virus, Reticuloendotheliosis virus and Rous Sarcoma virus. Particularly preferred Murine Leukemia Viruses include the 4070A and the 1504A viruses, Abelson (ATCC No VR-999), Friend (ATCC No VR-245), Gross (ATCC No VR-590), Rauscher (ATCC No VR-998) and Moloney Murine Leukemia Virus (ATCC No VR-190; PCT Application No WO 94/24298). Particularly preferred Rous Sarcoma Viruses include Bryan high titer (ATCC Nos VR-334, VR-657, VR-726, VR-659 and VR-728). Other preferred retroviral vectors are those described in Roth et al. (1996), PCT Application No WO 93/25234, PCT Application No WO 94/06920, Roux et al., (1989), Julan et al., (1992), and Neda et al., (1991), which disclosures are hereby incorporated by reference in their entireties.

[0408] Yet another viral vector system that is contemplated by the invention comprises the adeno-associated virus (AAV). The adeno-associated virus is a naturally occurring defective virus that requires another virus, such as an adenovirus or a herpes virus, as a helper virus for efficient replication and a productive life cycle (Muzyczka et al., 1992), which disclosure is hereby incorporated by reference in its entirety. It is also one of the few viruses that may integrate its DNA into non-dividing cells, and exhibits a high frequency of stable integration (Flotte et al. 1992; Samulski et al., 1989; McLaughlin et al., 1989), which disclosures are hereby incorporated by reference in their entireties. One advantageous feature of AAV derives from its reduced efficacy for transducing primary cells relative to transformed cells.

BAC Vectors

[0409] The bacterial artificial chromosome (BAC) cloning system (Shizuya et al., 1992), which disclosure is hereby incorporated by reference in its entirety, has been developed to stably maintain large fragments of genomic DNA (100-300 kb) in E. coli. A preferred BAC vector comprises a pBeloBACll vector that has been described by Kim et al. (1996), which disclosure is hereby incorporated by reference in its entirety. BAC libraries are prepared with this vector using size-selected genomic DNA that has been partially digested using enzymes that permit ligation into either the Bam HI or HindIII sites in the vector. Flanking these cloning sites are T7 and SP6 RNA polymerase transcription initiation sites that can be used to generate end probes by either RNA transcription or PCR methods. After the construction of a BAC library in E. coli, BAC DNA is purified from the host cell as a supercoiled circle. Converting these circular molecules into a linear form precedes both size determination and introduction of the BACs into recipient cells. The cloning site is flanked by two Not I sites, permitting cloned segments to be excised from the vector by Not I digestion. Alternatively, the DNA insert contained in the pBeloBACll vector may be linearized by treatment of the BAC vector with the commercially available enzyme lambda terminase that leads to the cleavage at the unique cosN site, but this cleavage method results in a full length BAC clone containing both the insert DNA and the BAC sequences.

Baculovirus

[0410] Another specific suitable host vector system is the pVL1392/1393 baculovirus transfer vector (Pharmingen) that is used to transfect the SF9 cell line (ATCC No. CRL 1711) which is derived from Spodoptera frugiperda. Other suitable vectors for the expression of the GENSET polypeptide of the present invention in a baculovirus expression system include those described by Chai et al., (1993), Vlasak et al., (1983), and Lenhard et al., (1996), which disclosures are hereby incorporated by reference in their entireties.

Delivery of the Recombinant Vectors

[0411] To effect expression of the polynucleotides and polynucleotide constructs of the invention, the constructs must be delivered into a cell. This delivery may be accomplished in vitro, as in laboratory procedures for transforming cell lines, or in vivo or ex vivo, as in the treatment of certain diseases states. One mechanism is viral infection where the expression construct is encapsulated in an infectious viral particle.

[0412] Several non-viral methods for the transfer of polynucleotides into cultured mammalian cells are also contemplated by the present invention, and include, without being limited to, calcium phosphate precipitation (Graham et al., 1973; Chen et al., 1987); DEAE-dextran (Gopal, 1985); electroporation (Tur-Kaspa et al., 1986; Potter et al., 1984); direct microinjection (Harland et al., 1985); DNA-loaded liposomes (Nicolau et al., 1982; Fraley et al., 1979); and receptor-mediated transfection. (Wu and Wu, 1987, 1988), which disclosures are hereby incorporated by reference in their entireties. Some of these techniques may be successfully adapted for in vivo or ex vivo use.

[0413] Once the expression polynucleotide has been delivered into the cell, it may be stably integrated into the genome of the recipient cell. This integration may be in the cognate location and orientation via homologous recombination (gene replacement) or it may be integrated in a random, non-specific location (gene augmentation). In yet further embodiments, the nucleic acid may be stably maintained in the cell as a separate, episomal segment of DNA. Such nucleic acid segments or “episomes” encode sequences sufficient to permit maintenance and replication independent of or in synchronization with the host cell cycle.

[0414] One specific embodiment for a method for delivering a protein or peptide to the interior of a cell of a vertebrate in vivo comprises the step of introducing a preparation comprising a physiologically acceptable carrier and a naked polynucleotide operatively coding for the polypeptide of interest into the interstitial space of a tissue comprising the cell, whereby the naked polynucleotide is taken up into the interior of the cell and has a physiological effect. This is particularly applicable for transfer in vitro but it may be applied to in vivo as well.

[0415] Compositions for use in vitro and in vivo comprising a “naked” polynucleotide are described in PCT application No. WO 90/11092 (Vical Inc.) and also in PCT application No. WO 95/11307 (Institut Pasteur, INSERM, Université d'Ottawa) as well as in the articles of Tascon et al. (1996) and of Huygen et al., (1996), which disclosures are hereby incorporated by reference in their entireties.

[0416] In still another embodiment of the invention, the transfer of a naked polynucleotide of the invention, including a polynucleotide construct of the invention, into cells may be accomplished with particle bombardment (biolistic), said particles being DNA-coated microprojectiles accelerated to a high velocity allowing them to pierce cell membranes and enter cells without killing them, such as described by Klein et al., (1987), which disclosure is hereby incorporated by reference in its entirety.

[0417] In a further embodiment, the polynucleotide of the invention may be entrapped in a liposome (Ghosh and Bacchawat, 1991; Wong et al., 1980; Nicolau et al., 1987, which disclosures are hereby incorporated by reference in their entireties).

[0418] In a specific embodiment, the invention provides a composition for the in vivo production of the GENSET polypeptides described herein. It comprises a naked polynucleotide operatively coding for this polypeptide, in solution in a physiologically acceptable carrier, and suitable for introduction into a tissue to cause cells of the tissue to express the said protein or polypeptide.

[0419] The amount of vector to be injected to the desired host organism varies according to the site of injection. As an indicative dose, it will be injected between 0.1 and 100 μg of the vector in an animal body, preferably a mammal body, for example a mouse body.

[0420] In another embodiment of the vector according to the invention, it may be introduced in vitro in a host cell, preferably in a host cell previously harvested from the animal to be treated and more preferably a somatic cell such as a muscle cell. In a subsequent step, the cell that has been transformed with the vector coding for the desired GENSET polypeptide or the desired fragment thereof is reintroduced into the animal body in order to deliver the recombinant protein within the body either locally or systemically.

Secretion Vectors

[0421] Some of the GENSET cDNAs or genomic DNAs of the invention may also be used to construct secretion vectors capable of directing the secretion of the proteins encoded by genes inserted in the vectors. Such secretion vectors may facilitate the purification or enrichment of the proteins encoded by genes inserted therein by reducing the number of background proteins from which the desired protein must be purified or enriched. Exemplary secretion vectors are described below.

[0422] The secretion vectors of the present invention include a promoter capable of directing gene expression in the host cell, tissue, or organism of interest. Such promoters include the Rous Sarcoma Virus promoter, the SV40 promoter, the human cytomegalovirus promoter, and other promoters familiar to those skilled in the art.

[0423] A signal sequence from a polynucleotide of the invention, preferably a signal sequences selected from the group of signal sequences of SEQ ID NOs: 1-85, 339-400, 406-407, 413-415, 561-594, and 634-651 and signal sequences of clone inserts of the deposited clone pool is operably linked to the promoter such that the mRNA transcribed from the promoter will direct the translation of the signal peptide. The host cell, tissue, or organism may be any cell, tissue, or organism which recognizes the signal peptide encoded by the signal sequence in the GENSET cDNA or genomic DNA. Suitable hosts include mammalian cells, tissues or organisms, avian cells, tissues, or organisms, insect cells, tissues or organisms, or yeast.

[0424] In addition, the secretion vector contains cloning sites for inserting genes encoding the proteins which are to be secreted. The cloning sites facilitate the cloning of the insert gene in frame with the signal sequence such that a fusion protein in which the signal peptide is fused to the protein encoded by the inserted gene is expressed from the mRNA transcribed from the promoter. The signal peptide directs the extracellular secretion of the fusion protein.

[0425] The secretion vector may be DNA or RNA and may integrate into the chromosome of the host, be stably maintained as an extrachromosomal replicon in the host, be an artificial chromosome, or be transiently present in the host. Preferably, the secretion vector is maintained in multiple copies in each host cell. As used herein, multiple copies means at least 2, 5, 10, 20, 25, 50 or more than 50 copies per cell. In some embodiments, the multiple copies are maintained extrachromosomally. In other embodiments, the multiple copies result from amplification of a chromosomal sequence.

[0426] Many nucleic acid backbones suitable for use as secretion vectors are known to those skilled in the art, including retroviral vectors, SV40 vectors, Bovine Papilloma Virus vectors, yeast integrating plasmids, yeast episomal plasmids, yeast artificial chromosomes, human artificial chromosomes, P element vectors, baculovirus vectors, or bacterial plasmids capable of being transiently introduced into the host.

[0427] The secretion vector may also contain a polyA signal such that the polyA signal is located downstream of the gene inserted into the secretion vector.

[0428] After the gene encoding the protein for which secretion is desired is inserted into the secretion vector, the secretion vector is introduced into the host cell, tissue, or organism using calcium phosphate precipitation, DEAE-Dextran, electroporation, liposome-mediated transfection, viral particles or as naked DNA. The protein encoded by the inserted gene is then purified or enriched from the supernatant using conventional techniques such as ammonium sulfate precipitation, immunoprecipitation, immunochromatography, size exclusion chromatography, ion exchange chromatography, and hplc. Alternatively, the secreted protein may be in a sufficiently enriched or pure state in the supernatant or growth media of the host to permit it to be used for its intended purpose without further enrichment.

[0429] The signal sequences may also be inserted into vectors designed for gene therapy. In such vectors, the signal sequence is operably linked to a promoter such that mRNA transcribed from the promoter encodes the signal peptide. A cloning site is located downstream of the signal sequence such that a gene encoding a protein whose secretion is desired may readily be inserted into the vector and fused to the signal sequence. The vector is introduced into an appropriate host cell. The protein expressed from the promoter is secreted extracellularly, thereby producing a therapeutic effect.

Cell Hosts

[0430] Another object of the invention comprises a host cell that has been transformed or transfected with one of the polynucleotides described herein, and in particular a polynucleotide either comprising a GENSET polypeptide-encoding polynucleotide regulatory sequence or the polynucleotide coding for a GENSET polypeptide. Also included are host cells that are transformed (prokaryotic cells) or that are transfected (eukaryotic cells) with a recombinant vector such as one of those described above. However, the cell hosts of the present invention can comprise any of the polynucleotides of the present invention. In a preferred embodiment, host cells contain a polynucleotide sequence comprising a sequence selected from the group consisting of sequences of SEQ ID NOs:1-169, 339-455, 561-784, sequences of clone inserts of the deposited clone pool, variants and fragments thereof. Preferred host cells used as recipients for the expression vectors of the invention are the following:

[0431] a) Prokaryotic host cells: Escherichia coli strains (I.E.DH5-α strain), Bacillus subtilis, Salmonella typhimurium, and strains from species like Pseudomonas, Streptomyces and Staphylococcus.

[0432] b) Eukaryotic host cells: HeLa cells (ATCC No.CCL2; No.CCL2.1; No.CCL2.2), Cv 1 cells (ATCC No.CCL70), COS cells (ATCC No.CRL1650; No.CRL1651), Sf-9 cells (ATCC No.CRL1711), C127 cells (ATCC No. CRL-1804), 3T3 (ATCC No. CRL-6361), CHO (ATCC No. CCL-61), human kidney 293. (ATCC No. 45504; No. CRL-1573) and BHK (ECACC No. 84100501; No. 84111301).

### c) Other Mammalian Host Cells

[0433] The present invention also encompasses primary, secondary, and immortalized homologously recombinant host cells of vertebrate origin, preferably mammalian origin and particularly human origin, that have been engineered to: a) insert exogenous (heterologous) polynucleotides into the endogenous chromosomal DNA of a targeted gene, b) delete endogenous chromosomal DNA, and/or c) replace endogenous chromosomal DNA with exogenous polynucleotides. Insertions, deletions, and/or replacements of polynucleotide sequences may be to the coding sequences of the targeted gene and/or to regulatory regions, such as promoter and enhancer sequences, operably associated with the targeted gene.

[0434] In addition to encompassing host cells containing-the vector constructs discussed herein, the invention also encompasses primary, secondary, and immortalized host cells of vertebrate origin, particularly mammalian origin, that have been engineered to delete or replace endogenous genetic material (e.g., coding sequence), and/or to include genetic material (e.g., heterologous polynucleotide sequences) that is operably associated with the polynucleotides of the invention, and which activates, alters, and/or amplifies endogenous polynucleotides. For example, techniques known in the art may be used to operably associate heterologous control regions (e.g., promoter and/or enhancer) and endogenous polynucleotide sequences via homologous recombination, see, e.g., U.S. Pat. No. 5,641,670, issued Jun. 24, 1997; International Publication No. WO 96/29411, published Sep. 26, 1996; International Publication No. WO 94/12650, published Aug. 4, 1994; Koller et al., (1989); and Zijlstra et al. (1989) (the disclosures of each of which are incorporated by reference in their entireties).

[0435] The present invention further relates to a method of making a homologously recombinant host cell in vitro or in vivo, wherein the expression of a targeted gene not normally expressed in the cell is altered. Preferably the alteration causes expression of the targeted gene under normal growth conditions or under conditions suitable for producing the polypeptide encoded by the targeted gene. The method comprises the steps of: (a) transfecting the cell in vitro or in vivo with a polynucleotide construct, said polynucleotide construct comprising; (i) a targeting sequence; (ii) a regulatory sequence and/or a coding sequence; and (iii) an unpaired splice donor site, if necessary, thereby producing a transfected cell; and (b) maintaining the transfected cell in vitro or in vivo under conditions appropriate for homologous recombination.

[0436] The present invention further relates to a method of altering the expression of a targeted gene in a cell in vitro or in vivo wherein the gene is not normally expressed in the cell, comprising the steps of: (a) transfecting the cell in vitro or in vivo with a polynucleotide construct, said polynucleotide construct comprising: (i) a targeting sequence; (ii) a regulatory sequence and/or a coding sequence; and (iii) an unpaired splice donor site, if necessary, thereby producing a transfected cell; and (b) maintaining the transfected cell in vitro or in vivo under conditions appropriate for homologous recombination, thereby producing a homologously recombinant cell; and (c) maintaining the homologously recombinant cell in vitro or in vivo under conditions appropriate for expression of the gene.

[0437] The present invention further relates to a method of making a polypeptide of the present invention by altering the expression of a targeted endogenous gene in a cell in vitro or in vivo wherein the gene is not normally expressed in the cell, comprising the steps of: a) transfecting the cell in vitro with a polynucleotide construct, said polynucleotide construct comprising: (i) a targeting sequence; (ii) a regulatory sequence and/or a coding sequence; and (iii) an unpaired splice donor site, if necessary, thereby producing a transfected cell; (b) maintaining the transfected cell in vitro or in vivo under conditions appropriate for homologous recombination, thereby producing a homologously recombinant cell; and c) maintaining the homologously recombinant cell in vitro or in vivo under conditions appropriate for expression of the gene thereby making the polypeptide.

[0438] The present invention further relates to a polynucleotide construct which alters the expression of a targeted gene in a cell type in which the gene is not normally expressed. This occurs when the polynucleotide construct is inserted into the chromosomal DNA of the target cell, wherein said polynucleotide construct comprises: a) a targeting sequence; b) a regulatory sequence and/or coding sequence; and c) an unpaired splice-donor site, if necessary. Further included are a polynucleotide construct, as described above, wherein said polynucleotide construct further comprises a polynucleotide which encodes a polypeptide and is in-frame with the targeted endogenous gene after homologous recombination with chromosomal DNA.

[0439] The compositions may be produced, and methods performed, by techniques known in the art, such as those described in U.S. Pat. NOs: 6,054,288; 6,048,729; 6,048,724; 6,048,524; 5,994,127; 5,968,502; 5,965,125; 5,869,239; 5,817,789; 5,783,385; 5,733,761; 5,641,670; 5,580,734; International Publication NOs:WO96/29411, WO 94/12650; and scientific articles described by Koller et al., (1994). (The disclosures of each of which are incorporated by reference in their entireties).

[0440] GENSET gene expression in mammalian cells, preferably human cells, may be rendered defective, or alternatively may be altered by replacing endogenous GENSET polypeptide-encoding genes in the genome of an animal cell by a GENSET polypeptide-encoding polynucleotide according to the invention. These genetic alterations may be generated by homologous recombination using previously described specific polynucleotide constructs.

[0441] Mammal zygotes, such as murine zygotes may be used as cell hosts. For example, murine zygotes may undergo microinjection with a purified DNA molecule of interest, for example a purified DNA molecule that has previously been adjusted to a concentration ranging from 1 ng/ml—for BAC inserts—to 3 ng/μl—for P1 bacteriophage inserts—in 10 mM Tris-HCl, pH 7.4, 250 μM EDTA containing 100 mM NaCl, 30 μM spermine, and70 μM spermidine. When the DNA to be microinjected has a large size, polyamines and high salt concentrations can be used in order to avoid mechanical breakage of this DNA, as described by Schedl et al (1993b), which disclosure is hereby incorporated by reference in its entirety.

[0442] Any one of the polynucleotides of the invention, including the polynucleotide constructs described herein, may be introduced in an embryonic stem (ES) cell line, preferably a mouse ES cell line. ES cell lines are derived from pluripotent, uncommitted cells of the inner cell mass of pre-implantation blastocysts. Preferred ES cell lines are the following: ES-E14TG2a (ATCC No.CRL-1821), ES-D3 (ATCC No.CRL1934 and No. CRL-11632), YS001 (ATCC No. CRL-11776), 36.5 (ATCC No. CRL-11116). ES cells are maintained in an uncommitted state by culture in the presence of growth-inhibited feeder cells which provide the appropriate signals to preserve this embryonic phenotype and serve as a matrix for ES cell adherence. Preferred feeder cells are primary embryonic fibroblasts that are established from tissue of day 13-day 14 embryos of virtually any mouse strain, that are maintained in culture, such as described by Abbondanzo et al. (1993) and are growth-inhibited by irradiation, such as described by Robertson (1987), or by the presence of an inhibitory concentration of LIF, such as described by Pease and Williams (1990), which disclosures are hereby incorporated by reference in their entireties.

[0443] The constructs in the host cells can be used in a conventional manner to produce the gene product encoded by the recombinant sequence.

[0444] Following transformation of a suitable host and growth of the host to an appropriate cell density, the selected promoter is induced by appropriate means, such as temperature shift or chemical induction, and cells are cultivated for an additional period. Cells are typically harvested by centrifugation, disrupted by physical or chemical means, and the resulting crude extract retained for further purification. Microbial cells employed in the expression of proteins can be disrupted by any convenient method, including freeze-thaw cycling, sonication, mechanical disruption, or use of cell lysing agents. Such methods are well known by the skilled artisan.

Transgenic Animals

[0445] The terms “transgenic animals” or “host animals” are used herein to designate animals that have their genome genetically and artificially manipulated so as to include one of the nucleic acids according to the invention. Preferred animals are non-human mammals and include those belonging to a genus selected from Mus (e.g. mice), Rattus (e.g. rats) and Oryctogalus (e.g. rabbits) which have their genome artificially and genetically altered by the insertion of a nucleic acid according to the invention. In one embodiment, the invention encompasses non-human host mammals and animals comprising a recombinant vector of the invention or a GENSET gene disrupted by homologous recombination with a knock out vector.

[0446] The transgenic animals of the invention all include within a plurality of their cells a cloned recombinant or synthetic DNA sequence, more specifically one of the purified or isolated nucleic acids comprising a GENSET polypeptide coding sequence, a GENSET polynucleotide regulatory sequence, a polynucleotide construct, or a DNA sequence encoding an antisense polynucleotide such as described in the present specification.

[0447] Generally, a transgenic animal according the present invention comprises any of the polynucleotides, the recombinant vectors and the cell hosts described in the present invention. In a first preferred embodiment, these transgenic animals may be good experimental models in order to study the diverse pathologies related to the dysregulation of the expression of a given GENSET gene, in particular the transgenic animals containing within their genome one or several copies of an inserted polynucleotide encoding a native GENSET polypeptide, or alternatively a mutant GENSET polypeptide.

[0448] In a second preferred embodiment, these transgenic animals may express a desired polypeptide of interest under the control of the regulatory polynucleotides of the GENSET gene, leading to high yields in the synthesis of this protein of interest, and eventually to tissue specific expression of the protein of interest.

[0449] The design of the transgenic animals of the invention may be made according to the conventional techniques well known from the one skilled in the art. For more details regarding the production of transgenic animals, and specifically transgenic mice, it may be referred to U.S. Pat. No. 4,873,191, issued Oct. 10, 1989; U.S. Pat. No. 5,464,764 issued Nov. 7, 1995; and U.S. Pat. No. 5,789,215, issued Aug. 4, 1998; these documents being herein incorporated by reference to disclose methods producing transgenic mice.

[0450] Transgenic animals of the present invention are produced by the application of procedures which result in an animal with a genome that has incorporated exogenous genetic material. The procedure involves obtaining the genetic material which encodes either a GENSET polypeptide coding sequence, a GENSET polynucleotide regulatory sequence, or a DNA sequence encoding a GENSET polynucleotide antisense sequence, or a portion thereof, such as described in the present specification. A recombinant polynucleotide of the invention is inserted into an embryonic or ES stem cell line. The insertion is preferably made using electroporation, such as described by Thomas et al. (1987), which disclosure is hereby incorporated by reference in its entirety. The cells subjected to electroporation are screened (e.g. by selection via selectable markers, by PCR or by Southern blot analysis) to find positive cells which have integrated the exogenous recombinant polynucleotide into their genome, preferably via an homologous recombination event. An illustrative positive-negative selection procedure that may be used according to the invention is described by Mansour et al. (1988), which disclosure is hereby incorporated by reference in its entirety.

[0451] The positive cells are then isolated, cloned and injected into 3.5 days old blastocysts from mice, such as described by Bradley (1987), which disclosure is hereby incorporated by reference in its entirety. The blastocysts are then inserted into a female host animal and allowed to grow to term. Alternatively, the positive ES cells are brought into contact with embryos at the 2.5 days old 8-16 cell stage (morulae) such as described by Wood et al. (1993), or by Nagy et al. (1993), which disclosures are hereby incorporated by reference in their entireties, the ES cells being internalized to colonize extensively the blastocyst including the cells which will give rise to the germ line.

[0452] The offspring of the female host are tested to determine which animals are transgenic e.g. include the inserted exogenous DNA sequence and which ones are wild type.

[0453] Thus, the present invention also concerns a transgenic animal containing a nucleic acid, a recombinant expression vector or a recombinant host cell according to the invention.

[0454] In another embodiment, transgenic animals are produced by microinjecting polynucleotides ares microinjected into a fertilized oocyte. Typically, fertilized oocytes are microinjected using standard techniques, and then cultured in vitro until a “pre-implantation embryo” is obtained. Such pre-implantation embryos preferably contain approximately 16 to 150 cells. Methods for culturing fertilized oocytes to the pre-implantation stage are described, e.g., by Gordon et al. ((1984) Methods in Enzymology, 101, 414); Hogan et al. ((1986) in Manipulating the mouse embryo. A Laboratory Manual. Cold Spring Harbor Laboratory Press, Cold Spring Harbor, N.Y) (for the mouse embryo); Hammer et al. ((1985) Nature, 315, 680) (for rabbit and porcine embryos); Gandolfi et al. ((1987) J. Reprod. Fert. 81, 23-28); Rexroad et al. ((1988) J. Anim. Sci. 66, 947-953) (for ovine embryos); and Eyestone et al. ((1989) J. Reprod. Fert. 85, 715-720); Camous et al. ((1984) J. Reprod. Fert. 72, 779-785); and Heyman et al. ((1987) Theriogenology 27, 5968) (for bovine embryos); the disclosures of each of which are incorporated herein in their entireties. Pre-implantation embryos are then transferred to an appropriate female by standard methods to permit the birth of a transgenic or chimeric animal, depending upon the stage of development when the transgene is introduced.

[0455] As the frequency of transgene incorporation is often low, the detection of transgene integration in pre-implantation embryos is often desirable using any of the herein-described methods. Any of a number of methods can be used to detect the presence of a transgene in a pre-implantation embryo. For example, one or more cells may be removed from the pre-implantation embryo, and the presence or absence of the transgene in the removed cell or cells can be detected using any standard method e.g. PCR. Alternatively, the presence of a transgene can be detected in utero or post partum using standard methods.

[0456] In a particularly preferred embodiment of the present invention, transgenic mammals are generated that secrete recombinant GENSET polypeptides in their milk. As the mammary gland is a highly efficient protein-producing organ, such methods can be used to produce protein concentrations in the gram per liter range, and often significantly more. Preferably, expression in the mammary gland is accomplished by operably linking the polynucleotide encoding the GENSET polypeptide to a mammary gland specific promoter and, optionally, other regulatory elements. Suitable promoters and other elements include, but are not limited to, those derived from mammalian short and long WAP, alpha, beta, and kappa, casein, alpha and beta lactoglobulin, beta-CN 5′ genes, as well as the the mouse mammary tumor virus (MMTV) promoter. Such promoters and other elements may be derived from any mammal, including, but not limited to, cows, goats, sheep, pigs, mice, rabbits, and guinea pigs. Promoter and other regulatory sequences, vectors, and other relevant teachings are provided, e.g., by Clark (1998) J Mammary Gland Biol Neoplasia 3:337-50; Jost et al. (1999) Nat. Biotechnol 17:1604; U.S. Pat. Nos. 5,994,616; 6,140,552; 6,013,857; Sohn et al. (1999) DNA Cell Biol. 18:845-52; Kim et al. (1999) J. Biochem. (Japan) 126:320-5; Soulier et al. (1999) Euro. J. Biochem. 260:533-9; Zhang et al. (1997) Chin. J. Biotech. 13:271-6; Rijnkels et al. (1998) Transgen. Res. 7:5-14; Korhonen et al. (1997) Euro. J. Biochem. 245:482-9; Uusi-Oukari et al. (1997) Transgen. Res. 6:75-84; Hitchin et al. (1996) Prot. Expr. Purif. 7:247-52; Platenburg et al. (1994) Transgen. Res. 3:99-108; Heng-Cherl et al. (1993) Animal Biotech. 4:89-107; and Christa et al. (2000) Euro. J. Biochem. 267:1665-71; the entire disclosures of each of which is herein incorporated by reference.

[0457] In another embodiment, the polypeptides of the invention can be produced in milk by introducing polynucleotides encoding the polypeptides into somatic cells of the mammary gland in vivo, e.g. mammary secreting epithelial cells. For example, plasmid DNA can be infused through the nipple canal, e.g. in association with DEAE-dextran (see, e.g., Hens et al. (2000) Biochim. Biophys. Acta 1523:161-171), in association with a ligand that can lead to receptor-mediated endocytosis of the construct (see, e.g., Sobolev et al. (1998) 273:7928-33), or in a viral vector such as a retroviral vector, e.g. the Gibbon ape leukemia virus (see, e.g., Archer et al. (1994) PNAS 91:6840-6844). In any of these embodiments, the polynucleotide may be operably linked to a mammary gland specific promoter, as described above, or, alternatively, any strongly expressing promoter such as CMV or MoMLV LTR.

[0458] The suitability of any vector, promoter, regulatory element, etc. for use in the present invention can be assessed beforehand by transfecting cells such as mammary epithelial cells, e.g. MacT cells (bovine mammary epithelial cells) or GME cells (goat mammary epithelial cells), in vitro and assessing the efficiency of transfection and expression of the transgene in the cells.

[0459] For in vivo administration, the polynucleotides can be administered in any suitable formulation, at any of a range of concentrations (e.g. 1-500 μg/ml, preferably 50-100 μg/ml), at any volume (e.g. 1-100 ml, preferably 1 to 20 ml), and can be administered any number of times (e.g. 1, 2, 3, 5, or 10 times), at any frequency (e.g. every 1, 2, 3, 5, 10, or any number of days). Suitable concentrations, frequencies, modes of administration, etc. will depend upon the particular polynucleotide, vector, animal, etc., and can readily be determined by one of skill in the art.

[0460] In a preferred embodiment, a retroviral vector such as as Gibbon ape leukemia viral vector is used, as described in Archer et al. ((1994) PNAS 91:6840-6844). As retroviral infection typically requires cell division, cell division in the mammary glands can be stimulated in conjunction with the administration of the vector, e.g. using a factor such as estrodiol benzoate, progesterone, reserpine, or dexamethasone. Further, retroviral and other methods of infection can be facilitated using accessory compounds such as polybrene.

[0461] In any of the herein-described methods for obtaining GENSET polypeptides from milk, the quantity of milk obtained, and thus the quantity of GENSET polypeptides produced, can be enhanced using any standard method of lacation induction, e.g. using hexestrol, estrogen, and/or progesterone.

[0462] The polynucleotides used in such embodiments can either encode a full-length GENSET protein or a GENSET fragment. Typically, the encoded polypeptide will include a signal sequence to ensure the secretion of the protein into the milk.

Recombinant Cell Lines Derived From the Transgenic Animals of the Invention

[0463] A further object of the invention comprises recombinant host cells obtained from a transgenic animal described herein. In one embodiment the invention encompasses cells derived from non-human host mammals and animals comprising a recombinant vector of the invention or a GENSET gene disrupted by homologous recombination with a knock out vector.

[0464] Recombinant cell lines may be established in vitro from cells obtained from any tissue of a transgenic animal according to the invention, for example by transfection of primary cell cultures with vectors expressing onc-genes such as SV40 large T antigen, as described by Chou (1989), and Shay et al. (1991), which disclosures are hereby incorporated by reference in their entireties.

### Uses of Polypeptides of the Invention

[0465] The polypeptides and polynucleotides of the present invention can be used in any of a large number of ways, including numerous in vitro and in vivo uses. Specific uses for many of the herein-described polypeptides and polynucleotides are described in detail below.

Protein of SEQ ID NO:255 (internal designation 500762786_{—}255-24-5-0-A2-R_{—}104)

[0466] The cDNA of clone 500762786_{—}255-24-5-0-A2-R_{—}104 (SEQ ID NO:86) encodes the human EDR4 protein LFPAPAPPPAPAFAPPPKVPSPERSAPRVPLPSPQPSYPFRPAASGGTPPPACLPPAQPCQGSP AMNLFRFLGDLSHLLAIILLLLKIWKSRSCAAHPQLPLSFCLSVCLSVSLSLSXSLSLSFSVSK KKKK (SEQ ID NO:255). It will be appreciated that all characteristics and uses of the polynucleotides of SEQ ID NO:86 and polypeptides of SEQ ID NO:355, described throughout the present application also pertain to the human cDNA of clone 500762786_{—}255-24-5-0-A2-R_{—}104 and polypeptides encoded thereby. Polypeptide fragments having a biological activity described herein and polynucleotides encoding the same are included in the present invention. Related polynucleotide and polypeptide sequences included in the present invention are SEQ ID NOs:406 and 520.

[0467] The normal functioning of the eukaryotic cell requires that all newly synthesized proteins be correctly folded, modified, and delivered to specific inter and extracellular sites. Newly synthesized membrane and secretory proteins enter a cellular sorting and distribution network during or immediately after synthesis (cotranslationally or posttranslationally) and are routed to specific locations inside and outside of the cell. The initial compartment in this process is the endoplasmic reticulum (ER) where proteins undergo modifications such as glycosylation, disulfide bond formation, and assembly into oligomers. The proteins are then transported through an additional series of membrane-bound compartments which include the various cistemae of the Golgi complex, where further carbohydrate modifications occur. Transport between compartments occurs by means of vesicles that bud and fuse in a specific manner; once within the secretory pathway, proteins do not have to cross a membrane to reach the cell surface.

[0468] The complexity of this system has advantages for the cell because it allows proteins to fold and mature in closed compartments that contain the appropriate enzyme catalysts. It is, however, dependent on sorting mechanisms that position the enzymes correctly and maintain them in place.

[0469] The first organelle in this system, the ER, contains multiple enzymes involved in protein structure modifications. Among these are BiP (binding protein) which directs the correct folding of proteins and, PDI (protein disulfide isomerase) and a homologue of the 90 kDa heat-shock protein, both of which catalyze the formation and rearrangement of disulfide bonds (Gething, M. J. and Sambrook, J. (1992) Nature 355:33-45). These abundant soluble proteins must be retained in the ER and must be distinguished from the newly synthesized secretory proteins which are rapidly transported to the Golgi apparatus. The signal for retention in the ER in mammalian cells consists of the tetrapeptide sequence, KDEL, located at the carboxy terminus of proteins. This sequence was first identified when the sequences of rat BiP and PDI were compared and it was subsequently found at the carboxy terminus of other luminal ER proteins from a number of species (Munro, S. (1986) Cell 46:291-300; Pelham, H. R. (1989) Ann. Rev. Cell. Biol. 5:1-23). Proteins containing this sequence leave the ER but are quickly retrieved from the early Golgi compartment and returned to the ER, while proteins without this signal continue through the distribution pathway.

[0470] Two endoplasmic retrieval receptors were first identified in S. cerevesiae; two human endoplasmic retrieval receptors were subsequently isolated by the use of degenerate PCR primers based on the S. cerevesiae sequences (Hardwick, K. G. (1990) EMBO J. 9:623-630; Semenza, J. C. (1990) Cell 61:1349-1357; Lewis, M. J. and Pelham, H. R. (1990) Nature 348:162-163; Lewis, M. J. and Pelham, H. R. (1992) J. Mol. Biol. 226:913-916). Comparisons of these sequences shows that they consist of a conserved 7-transmembrane domain structure with only short loops in the cell cytoplasm and the ER lumen. Studies with these endoplasmic retrieval receptors show that ligand binding controls the movement of the receptor; when expressed in COS cells, the human receptor is normally concentrated in the Golgi, but moves to the ER when bound to a ligand such as KDEL-tagged hen lysozyme (Lewis, M. J. and Pelham, H. R. (1992) Cell 68:353-364).

[0471] The ER retrieval function of these molecules serves to maintain the pool of enzymes in the ER that are necessary to perform protein structure modifications, retains newly synthesized proteins in the ER until they have been correctly modified, and regulates the structure of the Golgi apparatus. Saccharomyces cerevisiae cells that lack an ER retrieval receptor (Erd2) have a defective Golgi apparatus and fail to grow. Analysis of yeast Erd2 mutants suggests that their growth requires both the retention of multiple proteins in the ER and the selective removal of specific proteins from the Golgi (Townsley, F. M. (1994) J. Cell Biol. 127:21-28). Overexpression of a human ER retrieval receptor in COS cells results in hyperactive retrograde traffic from the Golgi to the ER leading to a loss of the Golgi structure and the breakdown of the secretory pathway (Hsu V. W. (1992) Cell 69:625-635).

[0472] Disruptions in the cellular secretory pathway have been implicated in several human diseases. In familial hypercholesterolemia the low density lipoprotein receptors remain in the ER, rather than moving to the cell surface (Pathak, R. K. (1988) J. Cell Biol. 106:1831-1841). A form of congenital hypothyroidism is produced by a deficiency of thyroglobulin, the thyroid prohormone. In this disease the thyroglobulin is incorrectly folded and is therefore retained in the ER (Kim, P. S. (1996) J.Cell Biol. 133:517-527). Mutant forms of proteolipid protein (PLP) have been examined as they play a role in generating dysmyelinating or hypomyelinating diseases. In this case, the mutations that result in disease are mutations that arrest transport of PLP in the ER and the early Golgi; the subsequent accumulation of PLP in the ER results in rapid oligodendrocyte death (Gow, A. (1994) J. Neurosci. Res. 37:574-583).

[0473] The human ER retrieval receptor function is necessary for processing and presentation of specific antigens to T cells. Many antigens must be processed intracellularly before they can be presented, in association with major histocompatability complex (MHC) molecules at the cell surface, for recognition by the antigen-specific receptor of T cells. Disruption of the ER retrieval receptor function with an antibiotic, Brefeldin A, abolishes the ability of a cell to present these specific antigen complexes to T cells. These antigenic proteins must be retained in the ER for cleavage to smaller peptides which can then bind to MHC molecules and be released for presentation at the cell surface. (Kakiuchi, T. (1991) J. Immunol. 147:3289-3295).

[0474] The discovery of polynucleotides encoding a novel human KDEL receptor, and the molecules themselves, provides the means to further investigate the regulation of the cellular protein secretory pathway. Discovery of molecules related to a novel human KDEL receptor satisfies a need in the art by providing a means or a tool for the study of this pathway and the diseases that involve the dysfunction of this pathway.

[0475] In an embodiment of the present invention, ERD4 polypeptides of the present invention are used to purify KDEL containing proteins and other homologous proteins with similar signals for ER retention such as “HDEL”, “DDEL”, “ADEL”, “SDEL”, “RDEL”, “KEEL”, “QEDL”, “HIEL”, “HTEL” and “KQDL”. This may be carried out by covalently or non-covalently attached the EDR4 polypeptides of the present invention to a column or other solid support using techniques well known in the art (e.g., affinity chromatography, panning, etc.). Once bound to the ERD4 polypeptide, the complex is washed to remove contaminants. The target protein is released using increasing salt concentrations either in a gradient or step type purification. The bound target protein may also be released from the ERD4 polypeptide by a single step up in salt concentration.

[0476] In another embodiment of the present invention, the EDR4 polypeptides of the present invention are used to detect KDEL containing proteins and other homologous sequences as described above by methods comprising the steps of contacting KDEL or other homologous sequences with an EDR4 polypeptide under conditions that allow binding to said sequence, and detecting the presence of bound EDR4. The presence of bound EDR4 can be detected using methods known in the art, such as by labeling EDR4 directly or indirectly. Bound EDR4 can be detected, for example, by using an antibody that specifically binds to EDR4 or another EDR4-binding compound that is detectable directly or indirectly.

[0477] Preferred ERD4 polypeptides for binding KDEL containing proteins and other homologous sequences described above comprise the amino acid sequence -KIWK- or -MNLFRFLGDLSHLLAIILLLLKIWKSRSCA-.

[0478] The present invention is further directed to a transformant comprising the following expression units in a co-expressible state: an expression unit containing a gene coding for an ERD4 polypeptide which is capable of binding to a protein localizing in the endoplasmic reticulum and having a signal for staying therein; an expression unit containing a gene coding for said protein localizing in endoplasmic reticulum; and an expression unit containing a foreign gene coding for a polypeptide which is a subject of function of said protein localizing in endoplasmic reticulum, and to a transformant comprising, in a co-expressible state, a fusion gene which is composed of a DNA fragment coding for a human serum albumin prepro-sequence and a foreign gene coding for a useful polypeptide. The present invention is also directed to a process for producing said polypeptide by co-expressing said genes in said transformant such that the polypeptide is predominantly secreted out of the transformant cell. Consequently, the invention has an advantage of improving the productivity of said polypeptide.

[0479] More particularly, the invention relates to: A transformed yeast cell comprising the following expression units integrated on a yeast chromosome in a co-expressible state: a first expression unit containing a gene coding for a receptor for an endoplasmic reticulum retention signal, wherein the receptor is the receptor protein ERD4 or a fragment thereof which is capable of binding to a retention signal selected from the group consisting of “KDEL”, “HDEL”, “DDEL”, “ADEL”, “SDEL”, “RDEL”, “KEEL”, “QEDL”, “HIEL”, “HTEL” and “KQDL”. and a second expression unit containing a gene encoding a protein disulfide isomerase, wherein said isomerase comprises an endoplasmic reticulum retention signal, or a gene encoding a fusion protein comprising the amino acid sequence of said isomerase and a human serum albumin prepro-sequence. These methods can be carried out using methods known in the art or described in U.S. Pat. No. 5,578,466, incorporated herein by reference in its entirety.

Proteins of SEQ ID NO:193 and 194 (internal designation 585770_{—}215-16-5-0-E8-F and 123996_{—}140-002-5-0-B4-F)

[0480] The cDNA of clones 585770_{—}215-16-5-0-E8-F (SEQ ID NO:24) and 123996_{—}140-002-5-0 B4-F (SEQ ID NO:25) encode the human Smooth Muscle and Pain Effector (SMPE) proteins: MRGATRVSIMLLLVTVSDCAVITGACERDVQCGAGTCCAISLWLRGLRMCTPLGRXGEEC HPGSHKIPFFRKRKHHTCPCLPNLLCSRFPDGRYRCSMDLKNINF (SEQ ID NO: 193) and MRGATRVSIMLLLVTVSDCAVITGACERDVQCGAGTCCAISLWLRGLRMCTPLGREGEEC HPGSHKIPFFRKRKHHTCPCLPNLLCSRFPDGRYRCSMDLKNINF (SEQ ID NO: 194), respectively. It will be appreciated that all characteristics and uses of the polynucleotides of SEQ ID NOs:24 and 25 and polypeptides of SEQ ID NO: 193 and 194, described throughout the present application also pertain to the human cDNA of clones 585770_{—}215-16-5-0-E8-F and 123996_{—}140-002-5-0-B4-F, and the polypeptides encoded thereby. Polypeptide fragments having a biological 25 activity described herein and polynucleotides encoding the same are also included in the present invention. Related polynucleotide and polypeptide sequences included in the present invention are SEQ ID NOs:360 and 447.

[0481] SMPE contracts longitudinal ileal muscle and distal colon, and relaxes the proximal colon. SMPE binds with a high affinity to both ileum and brain membranes. Therefore, included as embodiments of the present invention is a method of causing gastrointestinal smooth muscle cells to contract, in vitro or in vivo, comprising the steps of contacting said cells with a contracting effective amount of an SMPE polypeptide. Preferrably, the gastrointestinal smooth muscle cells are those of the longitudinal ileal or distal colon. A further embodiments of the present invention is a method of causing gastrointestinal smooth muscle cells to relax comprising the steps of contacting said cells with a relaxing effective amount of an SMPE polypeptide. Preferrably, the gastrointestinal smooth muscle cells are proximal colon cells. SMPE can also be used in the same manner to contract uterine cells. Therefore, included in the present invention is a method of causing uterine smooth muscle cells to contract comprising contacting said cells with a contracting effective amount of an SMPE polypeptide. Further included in the present invention is a method of causing smooth muscle cells (e.g., bladder, vascular) to contract comprising contacting said cells with a contracting effective amount of an SMPE polypeptide. Further included in the present invention is a method of inhibiting angiogenesis comprising contacting vascular endothelial cells with an angiogenesis inhibiting effective amount of an SMPE polypeptide. The SMPE anti-angiogenic affect can be measured using assays known in the art. For example, the anti-angiogenic effect in vivo can be assayed by using the 10-day-old embryo chick chorioallantoic membrane model.

[0482] SMPE binds with a high affinity to both ileum and brain membranes. Thefore, as a further embodiment of the present invention is a method of binding an SMPE polypeptide to ileum or brain membranes. The method can be further used as a method of detecting ileum or brain membranes comprising the steps of contacting ileum or brain membranes with an SMPE polypeptide under conditions that allow binding to said membranes, and detecting the presence of SMPE. The presence of SMPE can be detected using methods known in the art, such as by labeling SMPE directly or indirectly. Bound SMPE can be detected, for example, by using an antibody that specifically binds to SMPE or another SMPE-binding compound that is detectable directly or indirectly.

[0483] SMPE is also expressed in spermatocytes. Therefore, a further embodiment of the present invention is a method of detecting testes or spermatocytes by detecting an SMPE polypeptide or nucleic acid. An SMPE polypeptide can be detected using anti-SMPE antibodies or other SMPE-binding compounds. SMPE polynucleotides, such as mRNA, can be detected using methods known in the art such as PCR (RT-PCR), hybridization (Northern blot analysis), etc.

[0484] SMPE elicits hyperalgesia when it contacts the CNS, e.g., the brain. Therefore, the present invention includes a method of causing hyperalgesia comprising contacting the CNS with a hyperalgesia effecting amount of an SMPE polypeptide. SMPE can be delivered to the CNS using methods well known in the art including those described in PCT application WO9906060, incorporated herein by reference in its entirety. Using the methods of WO9906060, the TGF-alpha or other polypeptide that binds the epidermal growth factor (EGF) receptor, is substituted with an SMPE polypeptide of the present invention.

[0485] Further included in the present invention are methods of inhibiting the above SMPE activities using an inhibitor of SMPE. A preferred inhibitor of SMPE is an anti-SMPE antibody. Thus, an embodiment of the present invention is a method of inhibiting smooth muscle contraction (bladder, gastrointestional cells, uterine) or pain comprising the step of contacting said cells with an effective contractive or pain inhibiting amount of an anti-SMPE antibody or other SMPE inhibitor.

[0486] The invention further relates to a method of screening for test compounds that bind and/or inhibit an SMPE activity above comprising the steps of contacting an SMPE polypeptide with said test compound and detecting or measuring whether said test compound binds said SMPE polypeptide. Alternatively, the method comprises the steps of contacting an SMPE polypeptide with a binding target (e.g., smooth muscle cells or brain cells) of said SMPE polypeptide in the presence of a test compound, and detecting or measuring the binding of the SMPE polypeptide to said binding target, wherein a difference in the amount of said binding in the presence of said test compound relative to the amount of binding in the absence of the test compound indicates that the test compound modulates, preferably inhibits, the binding of said polypeptide to said binding target. The method may alternatively comprise the steps of contacting an SMPE polypeptide with a binding target in the presence of a test compound, wherein the binding of said SMPE polypeptide with said binding target elicits or causes a biological activity (e.g., activities described above) which is detected or measured, and further wherein a difference in the level of said biological activity in the presence of the test compound relative to the amount of biological activity in the absence of the test compound indicates that the test compound modulates, preferably inhibits or activates, the biological activity of said SMPE polypeptide.

[0487] Preferred SMPE polypeptides for use in the methods described herein include the amino acid sequences -AVITGACERDVQCGAGTCCAISLWLRGLRMCTPLGREGEECHPGSHKIPFFRKRKHH- or -TGACERDVQCGAGTCCAISLWLRGLRMCT- of SEQ ID NO: 193 or 194.

Protein of SEQ ID NO:305 (internal designation 500691428_{—}255-2-5-0-D4-R_{—}104)

[0488] The human cDNA of clone 500691428_{—}255-2-5-0-D4-R_{—}104 (SEQ ID NO:136) encodes the human VESICLE-ASSOCIATED MEMBRANE PROTEIN 10 or VAMP-10 protein: MSATAATAPPAAPAGEGGPPAPPPNLTSNRRLQQTQAQVDEVVDIMRVNVDKVLERDQKL SELDDRADALQAGPSQFETSAAKLKRKYWWKNLKMMIILGVICAIILIIIIVYFST (SEQ ID NO:305). It will be appreciated that all characteristics and uses of the polynucleotides of SEQ ID NO:136 and polypeptides of SEQ ID NO:305 described throughout the present application also pertain to the human cDNA of clone 500691428_{—}255-2-5-0-D4-R_{—}104 and the polypeptides encoded thereby. Polypeptide fragments having a biological activity described herein and polynucleotides encoding the same are also included in the present invention. Related polynucleotide and polypeptide sequences included in the present invention are SEQ ID NOs:432 and 546.

[0489] VAMP-10 is an integral membrane protein involved in the movement of vesicles from the plasmalemma of one cell, across the synapse, to the plasma membrane of the receptive neuron. This regulated vesicle trafficking pathway and the endocytotic process may be blocked by the highly specific action of clostridial, tetanus toxin (TeTx) and botulinum toxin (BoNT) and other metalloendoprotease neurotoxins which prevents neurotransmitter release by cleaving VAMPs. VAMP-10 is important in membrane trafficking. It participates in axon extension via exocytosis during development, in the release of neurotransmitters and modulatory peptides, and in endocytosis. The tightly-regulated synaptic vesicle cycle at the nerve terminal consists of the formation of synaptic vesicles, the docking of vesicles comprising VAMP-10 to the presynaptic plasma membrane, the fusion of these membranes and consequent neurotransmitter release, endocytosis of the empty vesicles and the regeneration of fresh vesicles. Endocytotic vesicular transport includes such intracellular events as the fusions and fissions of the nuclear membrane, endoplasmic reticulum, Golgi apparatus, and various inclusion bodies such as peroxisomes or lysosomes.

[0490] VAMP-10, like other VAMPs, has a three domain organization. The domains include a variable proline-rich, N-terminal sequence, a highly conserved central hydrophilic core of amino acids, and a hydrophobic sequence of amino acids presumed to be the membrane anchor.

[0491] In one aspect, the invention includes a VAMP-10 polypeptide composition for use in delivering a second composition, preferably nucleic acids, polypeptides, or small molecules such as therapeutic drugs, to target biological cells either in vitro or in vivo. The composition comprises a VAMP-10 polypeptide as a first molecule and a second molecule. The second molecule may, if desirable, be covalently or non-covalently attached or fused to the VAMP-10 polypeptide. The VAMP-10 polypeptide composition may further comprise artificial lipids to facilitate delivery of the second molecule by lipisomes or lipid vesicles. Methods for using VAMP-10 polypeptides in these methods are known in the art and include U.S. Pat. Nos. 6,074,844, 6,203,794 and 6,099,857, incorporated by reference in their entireties. In a preferred embodiment, VAMP-10 polypeptides are used to faciliate delivery of a second composition, e.g., lipisome mediated DNA transfection, to cells in culture, preferably neuronal cells, and further preferably to the presynaptic membrane.

[0492] VAMP-10 polypeptides are also useful in methods of inhibiting the release of neurotransmitters by preventing the docking and/or fusing of a presynaptic vesicle to the presynaptic membrane. These polypeptides may be referred to as excitation-secretion uncoupling peptides (ESUPs). Fragments of VAMP-10 having this blocking activity can be identified using methods known in the art (See e.g., U.S. Pat. Nos. 6,090,631 and 6,169,074 incorporated by reference in their entireties). ESUPs of the present invention comprise synthetic and purified VAMP-10 peptide fragments which correspond in primary structure to peptides which serve as binding domains for the assembly of a ternary protein complex (“docking complex”) which is critical to neuronal vesicle docking with the cellular plasma membrane prior to neurotransmitter secretion. Preferably, the primary sequence of the ESUPs of the invention also includes amino acids which are identical in sequence to the VAMP-10 peptide products of BoTx and TeTx proteolytic cleavage in neuronal cells, or fragments thereof (“proteolytic products”). For optimal activity, ESUPs of the invention have a minimum length of about 20 amino acids and a maximal length of about 28 amino acids, although they may be larger or smaller. Preferably, the ESUPs correspond in primary structure to binding domains in the docking complex, most preferably the region of such binding domains that are involved in the formation of a coiled-coil structure in the native docking complex proteins. ESUPs may also be used as pharmaceutical carriers as part of fusion proteins to deliver substances of interest into neural cells in a targeted manner. Preferred VAMP-10, or ESUP, polypeptides for use in inhibiting the release of neurotransmitters include those comprising -NRRLQQTQAQVDEVVDIMRVNVDKVLERDQKLSELDDRADALQAGPSQFETSAAKLKRK- of SEQ ID NO:305. More preferred ESUP polypeptides comprise an amino acid sequence portion of SEQ ID NO:305 selected from the group consisting of: RVNVDKVLERDQKLSELDD; KVLERDQKLSELDDRA; VNVDKVLERDQKLSELDDRA; DIMRVNVDKVLERDQKLSELDDRADAL; DEVVDIMRVNVD; QAQVDEVVDIMRVNVD; LQQTQAQVDEVVDIMRVNVD; QQTQAQVDEVVD; NRRLQQTQAQVDEVVD; and NLTSNRRLQQTQAQVDEVVD.

[0493] The ESUPs above may be used to inhibit or treat pain according to U.S. Pat. Nos. 6,113,915 or 5,989,545 (incorporated by reference herein in their entireties) by substituting the polypeptides of the present invention for BoTx type A.

[0494] Because VAMP-10 is a component of vesicles, antibodies to VAMP-10 are useful in the detection of vesicles, preferably neuronal vesicles transporting neurotransmitters. VAMP-10 can be used during purification of vesicles as a marker for vesicles or vesicles can be detected using antibodies to VAMP-10 in assays such as immunohistochemistry. Following exocytosis of vesicles, a portion of the VAMP-10 inserted in the vesicle appears on the surface of the axon, thus making VAMP-10 useful for the detection and monitoring of exocytosis of synaptic vesicles.

[0495] Detection of VAMP-10 expression (mRNA or protein) levels or mutated forms of VAMP-10 is further useful in the determination or diagnosing of whether someone is at risk of developing or has a neurological disorder, such as mood disorders selected from depression, bipolar disorder, schizophrenia, etc.), wherein a decreased level in expression of VAMP-10, mRNA or protein, as compared to an individual without a neurological disorder indicates the individual has the disorder or is as risk of having the disorder in the future.

[0496] The present invention further includes a novel assay system for toxins, such as clostridial, tetanus toxin (TeTx) and botulinum toxin (BoNT), using novel reagents. Preferably, methods of U.S. Pat. No. 6,043,042, incorporated by reference in its entirety, are used to perform the assay, wherein a VAMP-10 polypeptide is the substrate cleaved by the test compound. More specifically, the assay comprises the steps of:

[0497] The invention relates to an assay for botulinum toxin or tetanus toxin comprising the steps of:

[0498] (a) combining a test compound with a substrate and with antibody, wherein the substrate has a cleavage site for the toxin and when cleaved by toxin forms a product, and wherein the antibody binds to the product but not to the substrate; and wherein the substrate is a VAMP-10 polypeptide; and

[0499] (b) testing for the presence of antibody bound to the product, which product is attached to a solid phase assay component.

[0500] Preferably, in the practice of this invention, the VAMP-10 polypeptide is cleaved by the toxin to generate new peptides having N- and C-terminal ends. In addition, the peptide substrate is attached to a solid phase component of the assay.

[0501] The assay according to the invention may utilize assay components (a) and (b):

[0502] (a) a peptide linked to a solid-phase, the peptide being cleavable by the toxin-to generate a cleavage product,

[0503] (b) an antibody that binds to the cleavage product but not to the uncleaved polypeptide or an antibody that binds a cleavage product that is either the N-terminal or C-terminal portion of the VAMP-10, and the assay may comprise the steps of:

[0504] (i) combining a test compound that may contain or consist of the toxin with the solid-phase peptide to form an assay mixture,

[0505] (ii) subsequently or simultaneously combining the assay mixture with the antibody, and

[0506] (iii) subsequently or simultaneously determining whether there has been formed any conjugate between the antibody and the cleavage product.

[0507] Preferably, the step (i) of the assay is carried out in the presence of a zinc compound and a VAMP-10 polypeptide.

[0508] In this embodiment, the assay comprises:

[0509] (i) combining the test compound with a solid phase comprising a VAMP-10 polypeptide,

[0510] (ii) washing the test compound from the solid phase,

[0511] (iii) combining the solid phase with an antibody adapted for binding selectively with peptide cleaved by toxin, and

[0512] (iv) detecting a conjugate of the antibody with cleaved peptide.

[0513] In another embodiment, the assay comprises:

[0514] (i) adding a test solution to an assay plate comprising immobilized peptide, the peptide being a VAMP-10 polypeptide;

[0515] (ii) incubating the assay plate,

[0516] (iii) washing the plate with a buffer,

[0517] (iv) adding to the plate an antibody solution, said solution comprising an antibody adapted selectively to bind to a peptide selected from the group consisting of (1) the 50 C-terminal amino acid residues SEQ ID NO:305, the 30 C-terminal amino acid residues SEQ ID NO:305, and the 20 C-terminal amino acid residues SEQ ID NO:305 (any other VAMP-10 polypeptide of the present invention may also be selected).

[0518] (2) a peptide the N-terminal end of which is selected from the group consisting of: (1) the 50 N-terminal amino acid residues SEQ ID NO:305, the 30 N-terminal amino acid residues SEQ ID NO:305, and the 25 N-terminal amino acid residues SEQ ID NO:305 (any other VAMP-10 polypeptide of the present invention may also be selected).

[0519] (v) incubating the assay plate,

[0520] (vi) washing the plate with a buffer, and

[0521] (vii) measuring the presence of antibody on the assay plate.

[0522] In this embodiment, the antibody may be linked to an enzyme and the presence of antibody on the plate is measured by adding an enzyme substrate and measuring the conversion of the substrate into detectable product. The detectable product may be colored and measured by absorbance at a selected wavelength.

[0523] In the practice of the invention, the inactive toxin present in the test compound may be converted to active toxin. This may be accomplished by adding a protease to the test compound.

[0524] The antibody-peptide conjugate may be detected using a further antibody specific to the first antibody and linked to an enzyme.

Proteins of SEQ ID NO:171 (Internal Designation Clone ID:589115) and Related Protein of SEQ ID NO:457.

[0525] The polynucleotides of SEQ ID NO:2 and SEQ ID NO:340 and polypeptides of SEQ ID NO: 171 and 457 encode a C-terminal variant of Apolipoprotein A1, herein referred to as ApoAI-CTV. An embodiment of the invention includes compositions of SEQ ID NO:2, 340, 171, and 457 which encode for this novel variant of the apolipoprotein family of lipid transporting proteins. Specifically, ApoAI-CTV is a component of high density lipoprotein which functions to remove cholesterol from circulation and thus providing protection against the development of atherosclerosis, coronary atherosclerotic lesions and subsequent microvascular and cardiovascular disease.

[0526] Preferred polynucleotides of the invention are compositions of the novel portion of the cDNA from bases 465 to 521 of SEQ ID NO:2 including the nucleic acids comprising the sequences -GCAGCTTTCTTAACTATCCTAACAAGCCTTGGACCAAATGGAAATAAAGCTTTTTGA-, -GAAGGCAGCTTTCTTAACTATCCTAACAAGCCTTGGACCAAATGGAAATAAAGCTTTGA-, or -AGCTCTACCGCCAGAAGGCAGCTTTCTTAACTATCCTAACAAGCCTFGGACCAAATGG AAATAAAGCTTTTTGATGAAAAAA- of SEQ ID NO:2 and 340.

[0527] Preferred polypeptides of the invention are compositions of the novel C-terminal portion comprising the amino acid sequence -AAFLTILTSLGPNGNKAF, -MELYRQKAAFLTILTSLGPNGNKAF, or -QKKWQEEMELYRQKAAFLTILTSLGPNGNKAF of SEQ ID NO: 171 and SEQ ID NO:457.

[0528] Further preferred polypeptides of the invention include the compositions comprising the apolipoprotein domain KAAVLTLAVLFLTGSQARHFWQQDEPPQSPWDRVKDLATVYVDVLKDSGRDYVS QFEGSALGKQLNLKLLDNWDSVTSAFSNLREQLGPVTQEXWDNLEKETEGLRQEMSKDLE EVKAKVQPYLDDFQKKWQEEMELYRQKAAFLTILTSLGPNGNKA of SEQ ID NO: 171 and 457, or the amino acid residue positions −17 to +141 of SEQ ID NO:171.

[0529] An embodiment of the invention includes a method for treatment of atherosclerosis or cardiovascular diseases, comprising administering to an individual a therapeutically effective amount of apoAI-CTV or variants or mixtures thereof to lower total plasma cholesterol at least 5% of pretreatment levels.

[0530] Further utility of the polypeptides of the present invention may be further confirmed by methods of production and use of other apolipoproteins by those skilled in the art or as described by Ageland et al in U.S. Pat. No. 5,990,081, which disclosure is hereby incorporated by reference in its entirety.

[0531] It will be appreciated that all characteristics and uses of the polynucleotides of SEQ ID NO:2 and SEQ ID NO:340 and polypeptides of SEQ ID NO:171 and 457 described throughout the present application also pertain to the human cDNA of clone 589115.

Proteins of SEQ ID NO:302 (Internal Designation Clone ID:1000853793) and Related Protein of SEQ ID NO:543.

[0532] MRLFLSLPVLVVVLSIVLEGPAPAQGTPDVSSALDKLKEFGNTLEDKARELISRIKQ SELSAKMREWFSETFQKVKDKLKIDS

[0533] The polynucleotides of SEQ ID NO:133 and SEQ ID NO:429 encode human apolipoprotein CI (ApoCI) polypeptide of SEQ ID NO:302 and SEQ ID NO:543, respectively. The ApoCI of the invention differs by 1 amino acid comprising the amino acid sequence FQKVKDKLKI, where aspartate (D at position 77 of SEQ ID NO:302) replaces a glutamate (E) of the ApoCI of GENPEP accession X00570, AF050154, and M20902. ApoCI is a member of the apolipoprotein family of lipid binding and transporting proteins specifically functioning to transport cholesterol esters.

[0534] It will be appreciated that all characteristics and uses of the polynucleotides of SEQ ID NO:133 and SEQ ID NO:429 and polypeptides of SEQ ID NO:302 and SEQ ID NO:543, described throughout the present application also pertain to the human cDNA of clone 1000853793, and the polypeptides encoded thereby.

Proteins of SEQ ID NO:295 (Internal Designation Clone ID:642948), SEQ ID NO:296 (Internal Designation Clone ID:638743), and SEQ ID NO:539.

[0535] MEASALTSSAVTSVAKWRVASGSAVVLPLARIATVVIGGWAMAAVPMVLSAMGFTAA GIASSSIAAKMMSAAAIANGGGVASGSLVATLQSLGATGLSGLTKFILGSIGSAIAAVIARFY

[0536] The polynucleotides of SEQ ID NO:126, 127, and 425 and the polypeptides of SEQ ID NO:295, 296 and 539 encode human transmembrane, alpha-interferon-inducible polypeptides, aINFIP-1, aINFIP-1, and aINFIP-3, respectively. Preferred polynucleotides and polypeptides of the invention comprise the nucleic acid sequences of SEQ ID NO:126, 127, and 425 and amino acid sequences of SEQ ID NO:295, 296 and 539.

[0537] Preferred polypeptides of SEQ ID NO:295 and SEQ ID NO:539 for use in the methods described herein include the amino acid sequences comprising -VLSAMGFTAAGIASSSIAAKMMSAAAIANGGGVASG-, -SSIAAKMMSAAAIANGGGVASGSLVATLQSLGAT-, or -VIGGVVAMAAVPMVLSAMGFTAAGIASSSIAAKMMSAAAIANGGGVASGSLVATLQSLG ATGLSGLTK-.

[0538] Preferred polypeptides of SEQ ID NO:296 for use in the methods described herein include the amino acid sequence -AAAIANXGGVASGSLVATLQSLGATGLSGLTKF- or -LSAMGFTAAGIASSSIAAKMMSAAAIANXGGVASGSLVATLQSLGATGLS-.

[0539] It will be appreciated that all characteristics and uses of the polynucleotides of SEQ ID NOs:126, 127, and 425 and the polypeptides of SEQ ID NOs:295, 296 and 539, described throughout the present application also pertain to the human cDNA of Clone ID:642948 and Clone ID:638743, and the polypeptides encoded thereby.

[0540] Sites of glycine myristylation within a polypeptide function to modulate the activity and compartmentalization of the protein (Resh, M. D. Biochim Biophys Acta 1451:1-16 (1999)).

[0541] Preferred polypeptides of the invention include fragments comprising the sites of N-myristylation. Preferred amino acids of said sites within SEQ ID NO:295 and SEQ ID NO:539 include GGVVAM (positions 39-44), GIASSS (positions 60-65), GGGVAS (positions 79-84), GSLVAT (positions 85-90), and GSIGSX (positions 108-113). Further preferred are amino acids within 6 residues preceding or 6 residues following said amino acid sequences. Further preferred amino acids include sequences comprising the sites of N-myristylation in the polypeptides of SEQ ID NO:296. Preferred amino acids of said sites within SEQ ID NO:296 include IATVVIGGVVAMAAVPMV, MGFTAAGIASSSIAAKMM, AAIANXGGVASGSLVATL, NXGGVASGSLVATLQSLGA, and LTKFILGSIGSAIAAVIAR.

[0542] Interferons (IFNs) are a part of the group of intercellular messenger proteins known as cytokines and are part of the body's natural defense to viruses and tumors. Type I IFNs (alpha and beta interferons) are produced in a variety of cells types and their biosynthesis is stimulated by viruses and other pathogens, and by various cytokines and growth factors. Both α- and γ-IFNs are immunomodulators and anti-inflammatory agents, activating macrophages, T-cells and natural killer cells (reviewed in Jonasch and Haluska, Oncologist 6(1):34 (2001)). As part of the body's natural defense to viruses and tumors, INFs affect the function of the immune system and have direct action on pathogens and tumor cells. IFNs mediate these multiple effects by inducing the synthesis of cellular proteins, including the polypeptides of the present invention, aINFIP-1, aINFIP-1, and aINFIP-3.

[0543] Antiviral activity of the aINFIP polypeptides are assayed according to conventional methods (Tovey et al, Proc. Soc. Exp. Biol. and Med., 1974 146: 809-815). Preferred polypeptides of SEQ ID NO:295, 296 and 539 and fragments thereof include those which possess antiviral function, where preferred antiviral activity is against herpes simplex virus and hepatitis virus C, alone or in combination with known antiviral treatments such as interferon alpha.

[0544] The antitumor activity the aINFIP polypeptides of the invention can be demonstrated by similar methods using tumor cell lines rather than treatment of cells with virus as used to test antiviral activity. Tumor cell lines examples include MCF-7 (human breast cancer derived), NOS-1 (human oral primary squamous cell carcinoma derived), and MedB-1 (human primary mediastinal large B-cell lymphoma derived).

[0545] Further utility of the polypeptides of the present invention may be further confirmed by methods of interferon inducible proteins in the inhibition of viral functions such as cell penetration, uncoating, RNA and protein synthesis, assembly and release described in Hardman et al., Pharmacological Basis of Therapeutics, McGraw-Hill, New York N.Y. pp 1211-1214, 25 (1996), disclosure of which is hereby incorporated by reference in its entirety.

[0546] Another embodiment of the present invention relates to the use of aINFIP polypeptides or fragments thereof to treat and/or prevent the ill-effect of bacterial infection. In a preferred embodiment, the protein of the invention may be used to counteract the effects of the bacterial endotoxin lipopolysaccharide (LPS). The methods for using such compositions is described in Dziegielewska and Andersen, Biol. Neonate, 74:372-5 (1998), the disclosure of which is incorporated herein by reference in its entirety.

[0547] Furthermore, the aINFIP polypeptides or fragments thereof may be used to identify specific molecules with which it binds such as agonists, antagonists or inhibitors. Another embodiment of the present invention relates to methods of using the aINFIP polypeptides or fragments thereof to identify and/or quantify cytokines of the interferon family as well as other cytokines such as IL 10 and tumor antigens, which may interact with the aINFIP polypeptides of the invention.

[0548] The aINFIP polypeptides of the invention or fragments thereof are included in pharmaceutical preparations for treatment, prevention or alleviation of cancers. In another embodiment of the present invention, the aINFIP polypeptides of the invention or fragments thereof are used included in pharmaceutical preparations for treatment, prevention or alleviation of viral or bacterial infections. In another embodiment of the present invention, the aINFIP polypeptides of the invention or fragments thereof are used to inhibit and/or modulate the effect of cytokines and related molecule such as Il-2, TNF alpha, CTLA4, CD28, and others, by preventing the binding of the endogenous cytokine to their natural receptors, thereby blocking cell proliferation or inhibitory signals generated by the ligand-receptor binding event.

[0549] In another embodiment of the present invention, the aINFIP polypeptides of the invention or fragments thereof are useful to correct defects in in vivo models of disease such as autoimmune, inflammation and tumor models, by injecting the protein either intra peritoneally intravenously, subcutaneously or directly in the diseased tissue.

[0550] The polynucleotides of SEQ ID NO:126, 127, and 425 or fragments thereof is useful in diagnostic assays for aINFIP-1, aINFIP-2, or aINFIP-3 gene expression in in vitro models or in conditions associated with expression of the aINFIP polypeptides of the invention. The diagnostic assay is useful to distinguish between absence, presence, and excess expression of the gene and to monitor regulation of levels of the gene of the invention during therapeutic intervention. The DNA may also be incorporated into effective eukaryotic expression vectors and directly targeted to a specific tissue, organ, or cell population for use in gene therapy to treat the above mentioned conditions, including tumors and/or to correct disease- or genetic-induced defects in any of the above mentioned proteins including the protein of the invention.

Protein of SEQ ID NO:170 (Internal Designation Clone ID:502084) and Related Protein of SEQ ID NO:456.

[0551] The polynucleotides of SEQ ID NO:339 and polypeptides of SEQ ID NO:456 encode neutrophil stimulating protein 2, previously described in WO 9006321 (GENPEP accession A01319) as a novel factor having neutrophil-stimulating activity. The polynucleotide of SEQ ID NO:1 encodes a novel polypeptide variant, neutrophil stimulating protein 2v, comprising the amino acid sequence of SEQ ID NO:170 in which an aspartate (D) residue is located at position +16 of SEQ ID NO:170 rather than a glutamate (E). Preferred compositions of the invention include the polypeptides of SEQ ID NO: 170. Further preferred amino acids of SEQ ID NO: 170 comprise the sequence LAKGKDESLDS, QXKRNLAKGKDESLDSDLYAE, or SSTKGQXKRNLAKGKDESLDSDLYAELRCMCIKTTSGIHPKNIQSLEVIGKGTHCNQVEVIA TLKDGRKICLDPDAPRIKKIVQKKLAGDESAD. It will be appreciated that all characteristics and uses of the polynucleotides of SEQ ID NO:1 and SEQ ID NO:339 and polypeptides of SEQ ID NO:170 and SEQ ID NO:456, described throughout the present application also pertain to the human cDNA of clone 502084, and the polypeptides encoded thereby.

[0552] A preferred embodiment of the invention includes use of the novel neutrophil stimulating protein 2v of SEQ ID NO:170 in a method to stimulate wound healing by contacting the wound area with effective amount of polypeptide of SEQ ID NO:170 or further use as described in U.S. Pat. No. 5,804,176, which disclosure is hereby incorporated by reference in its entirety. A further preferred includes use of neutrophil stimulating protein 2v in the enhancement of angiogenesis for revascularization after injury such following myocardial infarction, wherein site of injury is contacted with effective amount of polypeptide of SEQ ID NO:170 or use as further described in U.S. Pat. No. 5,871,723, which disclosure is hereby incorporated by reference in its entirety. Antibodies against neutrophil stimulating protein 2v, by preventing or blocking the deposition of connective tissue matrix, are useful in the treatment of fibrotic disorders by contacting the polypeptides of SEQ ID NO:170 with fibrotic tissue, such as in scleroderma, liver cirrhosis, and myelofibrosis.

[0553] An embodiment of the invention includes fragments of SEQ ID NO:170 which comprise domains which impart function to this cytokine. Preferred fragments include the amino acid sequence comprising the IL8 domain, DSDLYAELRCMCIKTTSGIHPKNIQSLEVIGKGTHCNQVEVIATLKDGRKICLDPDAPRIKKI VQKKL. Further preferred amino acids include the small cytokines (intercrine/chemokine) C-x-C subfamily signature of the amino acid sequence comprising CMCIKTTSGIHPKNIQSLEVIGKGTHCNQVEVIATLKDGRKICLD.

[0554] Further preferred polypeptides include portions comprising sites of Protein Kinase C phosphorylation including amino acid residues 2 to 4, residues 13 to 15, residues 36 to 38 and residues 97 to 99 of SEQ ID NO: or amino acids sequence comprising SLR, SAR, STK, and TLK. Further preferred polypeptides include portions of the amino acid sequence comprising sites of Casein kinase II phosphorylation including amino acid residues 97 to 100 or the amino acid sequence comprising TLKD.

[0555] Further preferred polypeptides include portions of the amino acid sequence comprising sites of N-myristylation or the amino acid residues comprising GTHCNQ.

[0556] Further preferred polypeptides include the small cytokines (intercrine/chemokine) C-x-C subfamily signature of the amino acid sequence comprising CMCIKTTSGIHPKNIQSLEVIGKGTHCNQVEVIATLKDGRKICLD.

Proteins of SEQ ID NO: 227 (Internal Designation Clone ID: 166601) and Related Protein of SEQ ID NO:502.

[0557] Polynucleotides of SEQ ID NO:58 and SEQ ID NO:385 encode the polypeptides of SEQ ID NO:227 and SEQ ID NO:502, respectively, with amino acid sequence MAAAAVPSLLLSLPPHQGLTFSNKIQPFGAQGVLHPEPGLRDWLLPTCSRQLRVALPEKGS EGSLCQTQLPATPCFLPSNTVRT. It will be appreciated that all characteristics and uses of the polynucleotides of SEQ ID NOs:58 and 385 and polypeptides of SEQ ID NO:227 and 502, described throughout the present application also pertain to the human cDNA of clone 166601, and the polypeptides encoded thereby.

[0558] The polynucleotides of SEQ ID NO:58 and 385 and polypeptides of SEQ ID NO:227 and 502 encode a transcriptional regulatory protein. Preferred polynucleotides of the invention include the nucleic acid sequences comprising Clone 166601, the polynucleotides comprising SEQ ID NO:58 and the polynucleotides comprising SEQ ID NO:385. Preferred polypeptides of the invention include the amino acid sequences derived from the nucleic acid sequence comprising Clone 166601, the polypeptides comprising the amino acid sequences of SEQ ID NO:227 and the polypeptides comprising the amino acid sequences of SEQ ID NO:502.

[0559] In an embodiment of the invention, preferred polypeptides include the portion comprising the site of protein kinase C phosphorylation or the amino acid sequences comprising SNK or TVR of SEQ ID NO:227 and 502.

[0560] In another embodiment, preferred polypeptides of the invention include the portion of the amino acid sequence comprising sites of myristylation or the amino acids comprising the sequence GLTFSN or GSEGSL of SEQ ID NO:227 or 502.

Proteins of SEQ ID NO:268 (Internal Designation Clone ID:211056) and Related Protein of SEQ ID NO:530.

[0561] The polynucleotides of SEQ ID NO:99 and SEQ ID NO:416 and polypeptides of SEQ ID 35 NO:268 and SEQ ID NO:530, respectively, encode a novel human tryptophan hydroxylase, including the amino acid sequence hereafter referred to as nhTOH. Tryptophan is taken up by active transport into the neurons where it is hydroxylated to 5-hydroxytryptophan (5HTP). The latter is then decarboxylated to serotonin, a neurotransmitter involved in central nervous disorders, especially mood disorders, sleep disorders, and eating disorders. Activity of the polypeptide of the invention increases production of serotonin levels and increase the metabolism of tryptophan. Thus polypeptides of the invention are useful in the in vitro production of the serotonin and metabolism f tryptophan. As example, an expression vector containing the polynucleotides of SEQ ID NO:99 or SEQ ID NO:416 can be introduced into a cell line by methods known in the art such as by calcium precipitation; tryptophan can be supplied in the media; and serotonin produced by the cells can be extracted by known methods.

[0562] The invention further relates to a method of screening for test compounds that bind hnTOH comprising the steps of contacting a hnTOH polypeptide with said test compound and detecting or measuring whether said test compound binds said hnTOH polypeptide. The invention further relates to a method of screening for test compounds that activate hnTOH comprising the steps of contacting a hnTOH polypeptide with said test compound and detecting or measuring whether said test compound activates said hnTOH polypeptide, for example by measuring serotonin production or tryptophan depletion.

[0563] Another embodiment includes physiologically acceptable compositions of test compounds found to increase serotonin production, referred to as activators, in a screen. Further embodiments include methods to use activators that have been identified in a screen or previously known in the art in the preparation of physiological acceptable formulations for use in in vivo. Further preferred are methods to use activators in a physiologically acceptable formulation in the treatment of CNS disorders in which tryptophan and serotonin levels are aberrant, particularly depression, anxiety disorder, bipolar disorder, and eating disorders.

[0564] It will be appreciated that all characteristics and uses of the polynucleotides of SEQ ID NO:99 and SEQ ID NO:416 and polypeptides of SEQ ID NO:268 and SEQ ID NO:530, described throughout the present application also pertain to the human cDNA of clone 211056, and the polypeptides encoded thereby.

Proteins of SEQ ID NO: 190 (Internal Designation Clone ID: 147648) and Related Protein of SEQ ID NO:474.

[0565] The polynucleotides of SEQ ID NO:21 and SEQ ID NO:357 and polypeptides of SEQ ID NO:190 and SEQ ID NO:474 encode a novel DNA binding polypeptide containing a leucine zipper pattern multimerization domain, thereafter referred to as LZP, also known as bZIP transcription factor basic domain signature (Hai et al., Genes Dev. 3:2083(1989)). An embodiment of the present invention includes the polynucleotides, polypeptides and fragments thereof comprising the sequences of SEQ ID NO:21, 357, 190, and 474 of the invention. Preferred polypeptides of the present invention are directed to the amino acid sequences which comprise the leucine zipper domain selected from the following amino acids of SEQ ID NO:190 and 474 including LAAGAVTLGIGFFALASALWFL; PKGFFNYLTYFLAAGAVTLGIG; or FFALASALWFLICKRREIFQNS. It will be appreciated that all characteristics and uses of-the polynucleotides of SEQ ID NO:21 and SEQ ID NO:357 and polypeptides of SEQ ID NO:190 and SEQ ID NO:474, described throughout the present application also pertain to the human cDNA of clone 147648, and the polypeptides encoded thereby.

[0566] Leucine-zippers permit dimerization of various cytoplasmic hormone receptors and enzymes (Forman, et al., Mol Endocrinol, 3, 1610-1626 (1989)). Leucine zippers are also a common feature of transcription factors, where they permit homo- or heterodimerization resulting in tight binding to DNA strands (for reviews, see Abel, et al., Nature 341, 24-25 (1989); Jones, et al., Cell 61, 9-11 (1990); Lamb, et al., Trends in Biochemical Sciences 16, 417-422 (1991)). Therefore, preferred polypeptides of the present invention are useful tools in several areas of biotechnology, especially in protein engineering, where their ability to mediate homodimerization or hetero-dimerization has found several applications, including but not limited to immunochemistry, antibody generation, preparation of soluble oligomeric proteins, complementation assasys. The utility of the present invention may be further confirmed by methods described, for example, by Bosslet et al (U.S. Pat. No. 5,643,731) in which use of a pair of leucine zippers for in vitro diagnosis, in particular for the immunochemical detection and determination of an analyte in a biological liquid; by Tso et al (U.S. Pat. No. 5,932,448) in which use of leucine zippers for producing bispecific antibody heterodimers; by Conrad et al (U.S. Pat. No. 5,965,712), Ciardelli et al (U.S. Pat. No. 5,837,816), and Spriggs et al (WO9410308) in which methods of preparing soluble oligomeric proteins using leucine zippers have been described; and by Pelletier et al (WO9834120) in which methods to use leucine zipper forming sequences in protein fragment complementation assays to detect biomolecular interactions has been described, all examples which disclosures are hereby incorporated by reference in their entireties.

[0567] The multimerization activity of the polypeptides of the present invention containing leucine zipper domains may be assayed using any of the assays known to those skilled in the art including circular dichroism spectrum and thermal melting analyses as described in U.S. Pat. No. 5,942,433, which disclosures are hereby incorporated by reference in their entirety. Alternatively, the leucine zipper motif in LZP could be used by those skilled in art as a “bait protein” in a well established yeast double hybridization system to identify its interacting protein partners in vivo from cDNA library derived from different tissues or cell types of a given organism. Alternatively, LZP or part thereof could be used by those skilled in art in mammalian cell transfection experiments. When fused to a suitable peptide tag such as [His]₆ tag in a protein expression vector and introduced into culture cells, this expressed fusion protein can be immunoprecipitated with its potential interacting proteins by using anti-tag peptide antibody. This method could be chosen either to identify the associated partner or to confirm the results obtained by other methods such as those just mentioned.

[0568] In a preferred embodiment, the invention relates to compositions and methods of using the LZP polynuceotides and polypeptides of SEQ ID NO: and SEQ ID NO: or fragment thereof for preparing soluble multimeric proteins, which consist in multimers of fusion proteins containing a leucine zipper fused to a protein of interest, using any technique known to those skilled in the art including those described in international patent WO9410308, which disclosure is hereby incorporated by reference in its entirety. In another preferred embodiment, LZP or derivative thereof is used to produce bispecific antibody heterodimers as described in U.S. Pat. No. 5,932,448, which disclosure is hereby incorporated by reference in its entirety. Briefly, leucine zippers capable of forming heterodimers are respectively linked to epitope binding components with different specificities. Bispecific antibodies are formed by pairwise association of the leucine zippers, forming an heterodimer which links two distinct epitope binding components. In still another preferred embodiment, LZP or part thereof or derivative thereof is used for detection and determination of an analyte in a biological liquid as described in U.S. Pat. No. 5,643,731, which disclosure is hereby incorporated by reference in its entirety. Briefly, a first leucine zipper is immobilized on a solid support and the second leucine zipper is coupled to a specific binding partner for an analyte in a biological fluid. The two peptides are then brought into contact thereby immobilizing the binding partner on the solid phase. The biological sample is then contacted with the immobilized binding partner and the amount of analyte in the sample bound to the binding partner determined. In still another preferred embodiment, the LZP or part thereof may be used to synthesize novel nucleic acid binding proteins which are able to multimerize with proteins of interest, for example to inhibit and/or control cellular growth using any genetic engineering technique known to those skilled in the art including the ones described in the U.S. Pat. No. 5,942,433, which disclosure is hereby incorporated by reference in its entirety.

[0569] In another embodiment, the invention relates to compositions and methods using the LZP or part thereof or derivative thereof in protein fragment complementation assays to detect biomolecular interactions in vivo and in vitro as described in international patent WO9834120, which disclosures is hereby incorporated by reference in its entirety. Such assays may be used to study the equilibrium and kinetic aspects of molecular interactions including protein-protein, protein-nucleic acid, protein-carbohydrate and protein-small molecule interactions, for screening cDNA libraries for binding to a target protein with unknown proteins or libraries of small organic molecules for biological activity.

[0570] Still, another object of the present invention relates to the use of the LZP or part thereof for identifying new leucine zipper domains using any techniques for detecting protein-protein interaction known to those skilled in the art. Among the traditional methods which may be employed are co-immunoprecipitation, crosslinking and co-purification through gradients or chromatographic columns of cell lysates. Once isolated as a protein interacting with the LZP, such an intracellular protein can be identified (e.g. its amino acid sequence determined) and can, in turn, be used, in conjunction with standard techniques, to identify other proteins with which it interacts. The amino acid sequence thus obtained may be used as a guide for the generation of oligonucleotide mixtures that can be used to screen for gene sequences encoding such intracellular proteins. Screening may be accomplished, for example, by standard hybridization or PCR techniques. Techniques for the generation of oligonucleotide mixtures and the screening are well-known. (See, e.g., Ausubel el al., eds., Current Protocols in Molecular Biology, J.Wiley and Sons (New York, N.Y. 1993) and PR Protocols: A Guide to Methods and Applications, 1990, Innis, M. et al., eds. Academic Press, Inc., New York).

[0571] Alternatively, methods may be employed which result in the simultaneous identification of genes which encode the intracellular proteins that can dimerize with the LZP or part thereof using any technique known to those skilled in the art. These methods include, for example, probing cDNA expression libraries, in a manner similar to the well known technique of antibody probing of lambda.gt11 libraries, using as a probe a labeled version of the LZP or part thereof, or fusion protein, e.g., the LZP or part thereof fused to a marker (e.g., an enzyme, fluor, luminescent protein, or dye), or an Ig-Fc domain (for technical details on screening of cDNA expression libraries, see Ausubel et al, supra). Alternatively, another method for the detection of protein interaction in vivo, the two-hybrid system, may be used.

Proteins of SEQ ID NO:318 (Internal Designation Clone ID: 124608) and Related Protein of SEQ ID NO:556.

[0572] The polynucleotides of SEQ ID NO:149 and SEQ ID NO:442 and polypeptides of SEQ ID NO:318 and SEQ ID NO:556 encode an RNA-binding protein, hgRBP, which functions in RNA processing and protein expression. The preferred composition of SEQ ID NO:318 and 556 include MERPDKAALNALQPPEFRNESSLASTLKTLLFFTALMITVPIGLYFTTKSYIFEGALGMSNR DSYFYAAIVAVVAVHVVLALFVYVAWNEGSRQWREGKQD.

[0573] Further preferred polypeptides include those of SEQ ID NO:318 or SEQ ID NO:556 comprising an N-myristoylation site or the amino acid sequence at positions 43-48 or comprising the amino acid sequence GLYFTT which targets the protein to the membrane of the endoplasmic reticulum for function of hgRBP in translation of cellular mRNA into protein.

[0574] It will be appreciated that all characteristics and uses of the polynucleotides of SEQ ID NO: 149 and SEQ ID NO:442 and polypeptides of SEQ ID NO:318 and SEQ ID NO:556, described throughout the present application also pertain to the human cDNA 124608of clone , and the polypeptides encoded thereby.

Protein of SEQ ID NO:337 (Internal Designation Clone ID:113448)

[0575] The polynucleotides of SEQ ID NO:168 and related SEQ ID NO:454 and polypeptides of SEQ ID NO:337 encode a novel human RNA-binding protein involved in RNA processing and protein expression which is related to Clone ID:183902 and Clone ID:635993.

[0576] It will be appreciated that all characteristics and uses of the The polynucleotides of SEQ ID NO:168 and related SEQ ID NO:454 and polypeptides of SEQ ID NO:337, described throughout the present application also pertain to the human cDNA of clone 113448, and the polypeptides encoded thereby.

Protein of SEQ ID NO:328 (Internal Designation Clone ID: 183902)

[0577] Polynucleotides of SEQ ID NO: 159 and related SEQ ID NO:450 and polypeptides of SEQ ID NO:328 encode a novel human RNA-binding protein involved in RNA processing and protein expression which is related to Clone ID:113448 and Clone ID:635993.

[0578] It will be appreciated that all characteristics and uses of the The polynucleotides of SEQ ID NO:159 and related SEQ ID NO:450 and polypeptides of SEQ ID NO:328, described throughout the present application also pertain to the human cDNA of clone 183902, and the polypeptides encoded thereby.

Protein of SEQ ID NO:329 (Internal Designation Clone ID:635993)

[0579] Polynucleotides of SEQ ID NO:160 and related SEQ ID NO:451 and polypeptides of SEQ ID NO:329 encode a novel human RNA-binding protein involved in RNA processing and protein expression which is related to Clone ID:183902 and Clone ID:113448. It will be appreciated that all characteristics and uses of the The polynucleotides of SEQ ID NO:160 and related SEQ ID NO:451 and polypeptides of SEQ ID NO:329, described throughout the present application also pertain to the human cDNA of clone 635993, and the polypeptides encoded thereby.

[0580] Many eukaryotic proteins that bind single-stranded RNA contain one or more copies of a putative RNA-binding domain of about 90 amino acids. This is known as the eukaryotic RNA-binding region, RNP-1 signature or RNA recognition motif (RRM) (Bandziulis et al. Genes Dev. 3:431 (1989); Swanson et al. Trends Biochem. Sci. 13: 86-91 (1988)). RRMs are found in a variety of RNA binding proteins, including heterogeneous nuclear ribonucleoproteins (hnRNPs), proteins implicated in regulation of alternative splicing, and protein components of small nuclear ribonucleoproteins (snRNPs). The polypeptides of SEQ ID NO:337, 328, and 329 encode novel human RNA binding protein, hereafter referred to as ghRBP which contains one copy of an RRM. Further characteristic of a protein which binds to nucleic acids, ghRBP contains a zinc finger motif comprising the amino acid sequence. Preferred polynucleotides of the invention include polynucleotides comprising the nucleic acids of SEQ ID NO:159, 160, 168, 450,451,and 454. Preferred polypeptides of the invention are polypeptides comprising the amino acids of SEQ ID NO:337, 328 and 329. It will be appreciated that all characteristics and uses of the polynucleotides of SEQ ID NO:159, 160, 168, 450, 451 ,and 454 described throughout the present application also pertain to the human cDNA of Clone ID:183902, Clone ID:635993 and Clone ID:113448.

[0581] Preferred amino acids of the invention are residues which comprise the RNA-binding domain or portion thereof. Preferred amino acid sequences are selected from the following set of sequences including AFVRRXPWTAASSQLKEHFAQFGHVRRCILPFDKETGFHRGLGWVQFSSEEGLRNALQQE NHIIDGVKVQV; SINQPVAFVRRXPWTAASSQLKEHFAQFGHVRRCILPFDKETGFHRGLGWVQFSSEEGLRN ALQQENHIID; PWTAASSQLKEHFAQFGHVRRCILPFDKETGFHRGLGWVQFSSEEGLRNALQQENHIIDGV KVQVHTRRP. Further preferred are polypeptides of the invention include any fragment of SEQ ID NO: which binds to RNA.

[0582] An embodiment of the invention relates to methods of using the polypeptides of the invention to bind to RNA molecules in vitro by techniques that are known in the art. Preferred use of the polypeptides of the invention includes extraction of RNA from biological samples, chemical reagents, cell homogenates and tissue homogenates. Further utility of the polypeptides of the present invention or part thereof may be further confirmed by binding methods described in Trifillis, et al., RNA 5(8): 1071-82 (1999) and U.S. Pat. No. 6,107,029, which disclosures are hereby incorporated by reference in their entireties.

Proteins of SEQ ID NO:248 (Internal Designation Clone ID:199782). SEQ ID NO:249 (Internal Designation Clone ID:821212). SEQ ID NO:250 (Internal Designation Clone ID:202863) and Related Protein of SEQ ID NO:518.

[0583] The polynucleotides of SEQ ID NOs:79, 80, 81 and 401 and polypeptides of SEQ ID NOs:248, 249, 250 and 518 encode human RNA-associated polypeptides which act as splicing factors. It will be appreciated that all characteristics and uses of the polynucleotides of SEQ ID NOs:79, 80, 81 and 401 and polypeptides of SEQ ID NOs:248, 249, 250 and 518, described throughout the present application also pertain to the human cDNA of clones 199782, 821212, and 202863, and the polypeptides encoded thereby.

[0584] The translation of genetic information into protein depends on RNA and the first step in this process is the transcription of DNA into RNA while retaining all the genetic information encoded in DNA. The RNA transcript undergoes various processing steps which include splicing and polyadenylation. The mature RNA transcript is translated into protein by the ribosomal machinery. Nascent RNA transcripts are spliced in the nucleus by the spliceosomal complex which catalyzes the removal of introns and the rejoining of exons. At least 40 splicing factors have been identified and interaction of these factors are important in the conformational changes needed for the enzymatic removal of introns and religation of the exons. Both protein and RNA components are involved in the spliceosome assembly and the splicing reaction. There are 2 distinct catalytic steps involved in the RNA splicing reaction with distinct proteins and RNA species. Alternative splicing factors include developmentally regulated proteins that play key roles in developmental processes such as pattern formation and sex determination, respectively (Hodgkin, J. et al. (1994) Development 120:3681-3689). Alternate splicing is also involved in the tissue specific expression of isoforms of proteins, including structural proteins and enzymes.

[0585] An embodiment of the present invention relates to compositions of the polynucleotides of SEQ ID NO:79, 80, 81 and 401 and polypeptides of SEQ ID NO:248, 249, 250 and 518. Preferred amino acids of the invention comprise the zinc finger region or fragment thereof and are selected from the following sequences of amino acids from SEQ ID NO:248, 249, 250 and 518 including GACENCGAMTHKKKDCFE; NSIITKYRKGACENCGAM; or THKKKDCFERPRRVGAKF.

[0586] The polypeptides of SEQ ID NO:248, 249, 250 and 518 are involved in the splicesome complex and have function in the processing of RNA processing. Alternatively, the polypeptides of the present invention are involved in RNA processing and thus involved in protein expression. A preferred embodiment of the invention relates to a method of using the polynucleotides of polynucleotides of SEQ ID NO:79, 80, 81 and 401 in vitro. A preferred method of use relates to introduction of said polypeptides or fragments thereof into cells by techniques known in the art such as transfection or microinjection. Further preferred are methods to use the polynucleotides of the invention to alter protein expression in the given cell. Alternately, polypeptides of the present invention can be used in combination with reagents known in the art to alter protein expression in cell free expression systems, mammalian expression systems, insect expression systems, or bacterial expression systems. Furthermore, methods to use the polynucleotides or polypeptides the present invention to increase or decrease protein expression is preferred. The utility of the polypeptides of the invention or part thereof may be further confirmed using methods described in U.S. Pat. No. 6,020,164 and Chua and Reed, Gene Devel 13:841-850 (1999), which disclosures are hereby incorporated by reference in their entireties.

[0587] In another embodiment, methods to screen for inhibitors and activators of the polypeptides of the invention are preferred. In another embodiment, molecules or compounds which are identified in such a screen are further preferred. Further preferred are compounds which activate or inhibit activity of the polypeptides of the current invention. Activity of the the polypeptides of the invention is modified by phosphorylation at cAMP and cGMP dependent phosphorylation sites (including 3-6:55-58; 107-110) and casein kinase 11 phosphorylation sites (including 33-36:58-61:126-129). Preferred activators include but are not limited to compounds which promote accumulation of intracellular cAMP and cGMP. Further preferred activators include those compounds which activate casein kinase II. Preferred inhibitors are those compounds which inhibit intracellular cAMP and cGMP accumulation, or those compounds which promote cAMP and cGMP degradation. Further preferred inhibitors include compounds which promote the deactivation of casein kinase II. Furthermore, inhibitors and activators of the polypeptides of the present invention include compounds known in the art as well as compounds to be identified by the method of screening. Furthermore, compounds that inhibit or activate the activity of the polypeptides of the present invention by means other than phosphorylation or dephosphorylation are also preferred.

[0588] In another embodiment, a method for the use of the polynucleotides or polypeptides of the present invention in the treatment, prevention, attenuation or diagnosis of disorders of RNA processing or protein processing are preferred. Such disorders are selected from a group which includes but is not limited to cancers such as adenocarcinoma, leukemia, sarcoma, teratocarcinoma, and any disorder associated with cell growth and differentiation, embryogenesis, and morphogenesis involving any tissue, organ, or system, e.g., the brain, adrenal gland, or reproductive system.

Proteins of SEQ ID NO:256 (Internal Designation Clone ID:822794). SEQ ID NO:257 (Internal Designation Clone ID:337572) and Related Protein of SEQ ID NO:521.

[0589] The polynucleotides of SEQ ID NO:87, 88 and 407 and polypeptides of SEQ ID NO:256, 257 and 521 encode human nuclear polypeptides which interact with transcription factors of the Signal Transducers and Activators of Transcription (STAT) family of proteins involved in the regulation of cell division. It will be appreciated that all characteristics and uses of the polynucleotides of SEQ ID NO:87, 88 and 407 and polypeptides of SEQ ID NO:256, 257 and 521, described throughout the present application also pertain to the human cDNA of clones 822794 and 337572, and the polypeptides encoded thereby.

[0590] STATs are pleiotropic transcription factors which mediate cytokine-stimulated gene expression in multiple cell populations (Levy, Cytokine Growth Factor Rev., 8:81 (1997)). All STAT proteins contain a DNA binding domain, a Src homology 2 (SH2) domain, and a transactivation domain necessary for transcriptional activation of target gene expression. Janus kinases (JAK), including JAK1, JAK2, Tyk, and JAK3, are cytoplasmic protein tyrosine kinases (PTKs) which play pivotal roles in initiation of cytokine-triggered signaling events by activating the cytoplasmic latent forms of STAT proteins via tyrosine phosphorylation on a specific tyrosine residue near the SH2 domain (Ihle et al., Trends Genet., 11: 69 (1995); Darnell, Science 277(5332):1630 (1997); Johnston et al., Nature, 370: 1513 (1994)). Tyrosine phosphorylated STAT proteins dimerize through specific reciprocal SH2-phosphotyrosine interactions and translocate from the cytoplasm to the nucleus where they stimulate the transcription of specific target genes by binding to response elements in their promoters (Leonard, Nature Medicine, 2: 968 (1996); Zhong et al., PNAS USA, 91:4806 (1994) Darnell, Science, 277:1630 (1997)).

[0591] In an embodiment of the present invention, compositions of the polynucleotides and polypeptides or fragments thereof SEQ ID NO:87, 88 and 407 and SEQ ID NO:256, 257 and 521, respectively are included. Further preferred are polypeptides of the present invention which interact with activated STAT3, but may also interact with STAT1, STAT2 or other STAT homologues. Preferred polypeptides of the invention act to inhibit or decrease the activity of STATs. Further preferred amino acids of SEQ ID NO:256, 257 and 521 include the SAP domain VSSFRVSELQVLLGFAGRNKSGRKHDLLMRALHLL. Activation of cytokine receptors by their cognate ligands activate JAKs which in turn, activate STATS. Therefore cytokines and other hormones which signal through cytokine-like receptors may be modulated by polypeptides or polynucleotides of the present invention. Cytokines and other hormones which can thus be modulated by the present invention include but are not limited to interferons, interleukins, prolactin, and growth hormone. The utility of the polypeptides of the present invention or part thereof may be further confirmed using the methods described in WIPO Publication W09928465 which disclosure is hereby incorporated by reference in its entirety.

[0592] The polypeptides of this invention can be used in a method of inhibiting the activity of STAT proteins in a cell in vitro, the method comprising introducing a nucleic acid into the cell, wherein the nucleic acid comprises a nucleotide sequence encoding the amino acid sequence of SEQ ID NO:256, 257 and 521 or the amino acid sequence of SEQ ID NO:256, 257 and 521 with one or more conservative amino acid alterations, and wherein the nucleic acid expresses the amino acid sequence in an amount and for a time sufficient for the amino acid sequence to specifically bind to STAT proteins and to decrease STAT activity, thereby decreasing STAT activity in the cell.

[0593] Suitable compositions of polypeptides or polynucleotides of the present invention are useful as a method of treatment of pathologies such as diseases, syndromes, or other undesirable conditions resulting from defects in cell cycle progression. Such cell cycle defects may result from defects in the regulation of activated STAT or an upstream factor such as activated JNKs or activated cytokine receptors. Alternatively, polypeptides or polynucleotides of the present invention may be used in a method of treating pathologies resulting from defects in cell cycle progression due to defects in a step “downstream” of STAT regulation of cell cycle progression. In preferred embodiments, agonists of polypeptides or polynucleotides of the present invention are useful in the treatment of pathologies such as but not limited to hyperproliferative diseases such as cancer (e.g., leukemia, lymphoma, breast cancer, colon cancer, prostate cancer, Wilms' tumor), coronary artery disease, pulmonary vascular obstructive disease, either primary or as a feature of Eisenmenger's syndrome, and other disorders of abnormal cellular proliferation. Cells to be treated include but are not limited to hyperproliferative cells, cancer cells, vascular smooth muscle cells, endothelial cells, and gametes.

[0594] In some embodiments of the invention, antagonists of the polypeptides or polynucleotides of the present invention are used to stimulate, promote, or facilitate progression through the cell cycle, such as in the cellular regeneration of terminally differentiated cardiac myocytes or tissues, e.g., striated muscle myocytes. For example, this could allow restoration of damaged myocardium after cardiac injury, myocardial infarction, myocarditis, cardiomyopathy, trauma, as a consequence of cardiac surgery, etc., or repletion of striated muscle exhausted by muscular dystrophy.

[0595] In further embodiments, expression of the polypeptides encoded by the nucleic acids is expected to prevent, ameliorate, or lessen the cell cycle defect of the host cell, or to restore normal cell cycle progression of the host cell. Whether provided via nucleic acid or polypeptides delivered directly to cells, the therapeutic formulations of the invention can also be used as adjuncts to other forms of therapy, including but not limited to chemotherapy, and radiation therapy.

Protein of SEQ ID NO:330 (Internal Designation Clone ID:398703) and Related Protein of SEQ ID NO:330.

[0596] The polynucleotides of SEQ ID NO:161 and SEQ ID NO:452 and polypeptides of SEQ ID NO:330 encode a novel human deubiquitinating enzyme (GNP:AF017306). Deubiquitinating enzymes serve a number of functions (Hochstrasser Cur Opin Cell Biol 4:1024 (1992); Rose, In: Ubiguitin, Plenum Press, New York (1988)). First, ubiquitin must be cleaved from a set of biosyntheticprecursors, which occur either as a series of ubiquitin monomers in head-to-tail linkage or as fusions to certain ribosomal proteins (Finley & Chau, Annu Rev Cell Biol 7, 25-69 (1991)). Secondly, ubiquitin must be recycled from intracellular conjugates, both to maintain adequate pools of free ubiquitin and, in principle at least, to reverse the modification of inappropriately targeted proteins. Finally, deubiquitinating reactions may be integral to the degradation of ubiquitinated proteins by the 26S proteasome, a complex ATP-dependent enzyme whose exact composition and range of activities remain poorly characterized (Hershko & Ciechanover, Annu Rev Biochem 61, 761-807 (1992); Hadari et al., J Biol Chem 267, 719-727 (1992); Murakami et al., Nature 360, 597-9 (1992); Rechsteiner, J. Biol. Chem. 268, 6065-6068 (1993)).

[0597] An embodiment of the invention includes preferred polypeptides with ubiquitin-specific protease activity with a novel N-terminus of Clone ID:398703 comprising the amino acid sequence MCTTSLPCPIIMEPWGLATTKAAYVLFYQRRDDEFYKTPSLSSSGSSDGGTRPSSSQQGFGD DEACSMDTN encoded by ATGTGTACGACCTCATTGCCGTGTCCAATCATTATGGAGCCATGGGGGTTGGCCACTAC TAAAGCAGCTTATGTGCTATTTTACCAACGTCGAGATGATGAATTTTATAAGACACCTT CACTTAGCAGTTCTGGTTCCTCTGATGGAGGGACACGACCAAGCAGCTCTCAGCAGGG CTMTGGGGATGATGAGGCTTGCAGCATGGACACCAACTAA of SEQ ID NO: 161.

[0598] The preferred polypeptides of the invention are those which prevent or reverse ubiquitination of cellular proteins in vitro or in vivo. Further preferred are polypeptides of the invention which prevent or reverse ubiquitination of extracellular proteins in vitro or in vivo.

[0599] The polynucleotides of SEQ ID NO:161 and SEQ ID NO:452 encode polypeptides of SEQ ID NO:330 which contain protein domains or motifs including but not limited to a Protein kinase C phosphorylation site comprising the amino acid fragment SAR, and an N-myristylation site comprising amino acid fragment GLNMSE. Further preferred amino acids of SEQ ID NO: 330 include the Ubiquitin carboxyl-terminal hydrolases family 2 signature or amino acid sequence YDLIAVSNHYGAMGVGHY.

[0600] It will be appreciated that all characteristics and uses of the polynucleotides of SEQ ID NO:161 and SEQ ID NO:452 and polypeptides of SEQ ID NO:330, described throughout the present application also pertain to the human cDNA of clone 398703, and the polypeptides encoded thereby.

[0601] The utility of the polynucleotides and polypeptides of the present invention or part thereof may be further confirmed using methods which assess activity or function of deubiquitinating enzymes described in United States Patents 5391490 and 5565352 which disclosures are hereby incorportated by reference in their entireties.

Proteins of SEQ ID NO:277 (Internal Designation Clone ID:653966) and Related Protein of SEQ ID NO:535.

[0602] The polynucleotides of SEQ ID NO:108 and SEQ ID NO:421 and polypeptides of SEQ ID NO:277 and SEQ ID NO:535 encode human liver fatty acid binding protein (L-FABP) comprising the amino acid sequence of SEQ ID NO:277 and 535. The amino acid sequence of SEQ ID NO:277 and 535 are the same as human L-FABP (Genbank accession GNP:M10617; Lowe et al., JBC 260:3413-17 (1985)) and homologous to human FABP (Genbank accession GNP:M10050). The polypeptides of the present invention belong to the FABP/P2/CRBP/CRABP family of transporters and functionally binds to free fatty acids and derivatives thereof. L-FABP is normally expressed in the cytoplasm of hepatocytes, but preferred embodiments include use of the polypeptides of the present invention as extracellular polypeptides. Further preferred embodiments include use of the polypeptides of the present invention as serum or plasma polypeptides. Further preferred embodiments use polypeptides of the invention in vitro. Still further preferred embodiments include use of the polypeptides of the present invention in vivo.

[0603] Preferred amino acids of the invention include the lipocalin domain, from 2 to 127 or polypeptides comprising the amino acid sequence SFSGKYQLQSQENFEAFMKAIGLPEELIQKGKDIKGVSEIVQNGKHFKFTITAGSKVIQNEFT VGEECELETMTGEKVKTVVQLEGDNKLVTTFKNIKSVTELNGDIITNTMTLGDIVFKRISKR I. The polypeptides of SEQ ID NO:277 and SEQ ID NO:535 contain a cytosolic fatty-acid binding protein signature comprising the amino acid sequence GKYQLQSQENFEAFMKAI which functions in the polypeptides ability to bind small hydrophobic molecules, such as lipids, steroid hormones, and retinoids. Preferred amino acids of SEQ ID NO:277 and SEQ ID NO:535 include GKYQLQSQENFEAFMKAI, MSFSGKYQLQSQENFEAF, and LQSQENFEAFMKAIGLPE.

[0604] Phosphorylation status modulates the activity of L-FABP. Preferred polypeptides of the invention include the amino acids sequence comprising the sites of cAMP- and cGMP-dependent protein kinase phosphorylation including residues of SEQ ID NO:277 and 535 comprising the sequence KRIS.

[0605] Further preferred polypeptides of the invention include the amino acid sequence comprising the sites of Protein kinase C phosphorylation including residues at positions 4 to 6, 94 to 96, and 124 to 126 of SEQ ID NO:277 and 535. Still further preferred polypeptides of SEQ ID NO:277 and 535 include the amino acid sequence comprising SGK, TFK, and SKR.

[0606] Further preferred are polypeptides of SEQ ID NO:277 and 535 include the amino acid sequence comprising a Casein kinase II phosphorylation sites. Preferred amino acids of SEQ ID NO:277 and 535 include positions 64 to 67, 100 to 103, and 114 to 117. Further preferred amino acids comprise the sequences TVGE, SVTE, and TLGD.

[0607] A preferred polypeptide of SEQ ID NO:277 and 535 is one in which the amino acid asparagine (Asn) is located at residue 105, further referred to as the N-isoform. Further preferred is the polypeptide of SEQ ID NO:277 and 535 in which the amino acid aspartate (Asp) is located at residue 105 further referred to as the D-isoform. The rat homologue of the human D-isoform of the present invention was shown to have a greater affinity to lysophospholipids, prostaglandins, retinoids, bilirubin and bile salts compared to the rat homologue of the human N-isoform of the present invention by methods described by DiPietro and Santome, Biochim Biophys Acta 1478 :186-200 (2000) which disclosure is hereby incorporated by reference in its entirety. The rat homologues share only 82% identity with the of the human D- and N-isoforns, therefore it is not predictable to find that the human D-isoform has equal or greater affinity to lysophospholipids, prostaglandins, retinoids, bilirubin, bile salts and fatty acid compared to the human N-isoform.

[0608] Further preferred polypeptides of the present invention include the D-isoform polypeptide and fragments thereof which have an equal or at least 10%, 20%, 30%, 40%, 50%, 60% or 75% greater affinity for fatty acids, and lipophilic compounds selected from a group including but not limited to lysophospholipids, prostaglandins, retinoids, bilirubin, bile salts, steroid hormones (such as testosterone and estradiol), and cholesterol compared to the N-isoform.

[0609] Another embodiment of the invention includes polynucleotides or polypeptides of the invention or fragments thereof which bind lipophilic compounds selected from a group including but not limited to free fatty acids, lysophospholipids, prostaglandins, retinoids, bilirubin, bile salts, steroid hormones (such as testosterone and estradiol), and cholesterol in serum or plasma. Further preferred are polypeptides of the invention which bind lipophilic compounds in serum or plasma separated from whole blood in a process of purifying serum or plasma for use in vitro or in vivo. Further preferred are polypeptides of the invention which bind lipophilic compounds in serum or plasma in vivo.

[0610] In a further embodiment, polynucleotides or polypeptides of the invention or fragments thereof, in physiological appropriate formulations, are useful in the prevention, treatment or attenuation of conditions in which lipophilic compounds are elevated in the serum of mammals, preferably humans. Such conditions are selected from a group which include but are not limited to obesity, hyperlipidemia, hypercholesterolemia, hypertriglyceridemia, diabetes type I (IDDM) diabetes type II (NIDDM), atherosclerosis, and hypertension.

[0611] Mammary-derived growth inhibitor (MDGI) and heart-fatty acid binding protein (FABP), which belong to the FABP family, specifically inhibit growth of normal mouse mammary epithelial cells (MEC) and promote morphological differentiation, stimulates its own expression and promotes milk protein synthesis (U.S. Pat. No. 5,977,309, 24 Mar. 1995). In further preferred embodiments, polypeptides of the invention include those which locally signal growth cessation and stimulate differentiation of the developing epithelium. Further preferred polypeptides of the invention suppress the mitogenic effects of EGF family members, and inhibit c-fos, c-myc and c-ras expression.

[0612] In a further aspect of the present invention, there is provided a method for producing such polypeptide by recombinant techniques comprising culturing recombinant prokaryotic and/or eukaryotic host cells, containing a human fatty acid binding polypeptides or polynucleotides of the invention acid under conditions promoting expression of said protein and subsequent recovery of said protein.

[0613] In a further embodiment of the present invention, there is provided a method for utilizing such polypeptides, or polynucleotides of the invention for therapeutic purposes, for example, as a cell growth inhibitor and as to cause differentiation stimulatory activity on various responsive types of tissues and cells in vitro. Further preferred are methods for use of polypeptides, or polynucleotides of the invention, in appropriate physiological form, for therapeutic purposes for to inhibit cell proliferation or to induce cell differentiation in mammals, preferably humans.

[0614] It will be appreciated that all characteristics and uses of the polynucleotides of SEQ ID NO:108 and SEQ ID NO:421 and polypeptides of SEQ ID NO:277 and SEQ ID NO:535, described throughout the present application also pertain to the human cDNA of clone 653966, and the polypeptides encoded thereby.

Proteins of SEQ ID NO:313 (Internal Designation Clone ID:633418). SEQ ID NO:314 (Internal Designation Clone ID:422878) and Related Protein of SEQ ID NO:552.

[0615] The polynucleotides of SEQ ID NO:144, 145 and 438 and polypeptides of SEQ ID NO:313, 314and 552 encode a cleavage stimulation factor important in mRNA processing and protein expression. Protein kinase C phosphorylation increases activity of said polypeptides and preferred amino acids include SEK and SGR. Further, sites of tyrosine kinase phosphorylation increase activity of said polypeptides and preferred amino acids of SEQ ID NO:314, 552 include KKLEENPY.

[0616] It will be appreciated that all characteristics and uses of the polynucleotides of SEQ ID NO:144, 145 and 438 and polypeptides of SEQ ID NO:313, 314and 552, described throughout the present application also pertain to the human cDNA of clones 633418 and 422878, and the polypeptides encoded thereby.

[0617] Proteins of SEQ ID NO:219 (Internal Designation Clone ID:589848), SEQ ID NO:220 (Internal Designation Clone ID:211883). SEQ ID NO:221 (Internal Designation Clone ID:642603). SEQ ID NO:222 (Internal Designation Clone ID: 193316), and Related Protein of SEQ ID NO:497.

[0618] Polynucleotides of SEQ ID NO:50, 51, 52, 53, 380 and polypeptides of SEQ ID NO:219, 220, 221 and 497 encode RNA associated proteins with a ribosomal L34 domain comprising the amino acid sequence NEYQPSNIKRKNKHGWVRRLXTPAGXXXILRRMLKGRKSLSH or NEYQPSNIKRKNKHGWVRRLXTPAGVQVILRRMLKGRKSLSH. It will be appreciated that all characteristics and uses of the polynucleotides of SEQ ID NOs:50, 51, 52, 53,380 and polypeptides of SEQ ID NOs:219, 220, 221 and 497, described throughout the present application also pertain to the human cDNA of clones 589848, 211883, 642603 and 193316, and the polypeptides encoded thereby.

Proteins of SEQ ID NO:302 (Internal Designation Clone ID:1000891255) and Related Protein of SEQ ID NO:543.

[0619] Polynucleotides of SEQ ID NO:133 and 429 and polypeptides of SEQ ID NO:302 and 543 encode human ribosomal protein, hRIBPRT. An embodiment of the invention includes the compositions of the polypeptides of SEQ ID NO:302 and 543, comprising the amino acid sequence MVAAKKTKKSLESIKSRLQLVMKSGKYVLGYKQTLKMIRQGKAKLVILANNCPALRKSEI EYYAMLAKTGVHHYSGNNIELGTACGKYYRVCTLAIIDPXDSXIIRSMPEQTGEK, and the polynucleotides of SEQ ID NO:133 and 429, respectively, which encode human ribosomal protein, hRIBPRT. The polypeptides of the invention contain the ribosomal protein L30e/L7Ae/S12e/Gadd4 signature (Koonin E V, J Mol Med 75:236-238 (1997) and Nakanishi et al., Gene 35:289-96 (1985)).

[0620] Preferred polypeptides of the invention include the amino acid sequence comprising KSLESIKSRLQLVMKSGKYVLGYKQTLKMIRQGKAKLVILANNCPALRKSEIEYYAMLAK TGVHHYSGNNIELGTACGKYYRVCTLAIIDPXDSXIIR; KSLESIKSRLQLVMKSGKYVLGYKQTLKMIRQGKAKLVILANNCPALRK; and SEIEYYAMLAKTGVHHYSGNNIELGTACGKYYRVCTLAIIDPXDSXIIR. Further preferred amino acids of the invention include sites of PKC phosphorylation, comprising the amino acid sequences of SEQ ID NO:302 and 543 including TKK (positions 7-13); SIK (positions 13-15); SGK (positions 2426); and TLK (positions 34-36). Further preferred amino acids of the invention include sites of Casein Kinase II phosphorylation, comprising the amino acid sequences SEIE (positions 58-6 1) and SMPE (positions 107-110).

[0621] In another embodiment, the proteins of SEQ ID NO:302 and 543 can be used to bind to nucleic acids, preferably RNA, alone or in combination with other substances. For example, the proteins of the invention or part thereof can be added to a sample containing RNAs in optimum conditions for binding, and allowed to bind to RNAs. In a preferred such embodiment, the proteins of the invention or part thereof may be used to purify mRNAs, for example to specifically isolate RNA, e.g. from a specific cell type or from cells grown under particular conditions. Such RNAs could then be reverse transcribed and cloned, could be analyzed for relative expression analyses, etc. In addition, such methods may be used to specifically remove RNA from a sample, for example during the purification of DNA. To carry out any of these methods, the proteins of the invention or part thereof may be bound to a chromatographic support, either alone or in combination with other RNA binding proteins, to form an affinity chromatography column. A sample containing a mixture of nucleic acids to purify is then run through the column. Immobilizing the proteins of the invention or part thereof on a support is particularly advantageous for embodiments in which the method is to be practiced on a commercial scale. This immobilization facilitates the removal of RNAs from the batch of resin-coupled protein after binding, and allows subsequent re-use of the protein. Immobilization of the proteins of the invention or part thereof can be accomplished, for example, by inserting any matrix binding domain in the protein according to methods known to those skilled in the art. The resulting fusion product including the proteins of the invention or part thereof is then covalently, or by any other means, bound to a protein, carbohydrate or matrix (such as gold, “Sephadex” particles, polymeric surfaces).

[0622] Another embodiment of the present invention relates to methods and compositions using the proteins of the invention, or part thereof, to associate specific mRNAs to the inner face of lipidic bilayers of liposomes in order to further introduce these mRNAs into the cytoplasm of eukaryotic cells. Preferably, specific mRNAs are first associated with the protein of the invention and the RNA/protein complex formed in that way is then mixed with liposomes according to methods known to those skilled in the art. These liposomes are added to an in vitro culture of eukaryotic cells. In vivo, such a method might treat and/or prevent disorders linked to dysregulation of gene transcription such as cancer and other disorders relating to abnormal cellular differentiation, proliferation, or degeneration.

[0623] A decrease in ribosome function results in a significant inhibition of cell growth. Therefore, in another embodiment, the present proteins and nucleic acids can be used to modulate the rate of cell growth in vitro or in vivo. Accordingly, compounds that inhibits the expression or function of the proteins of the invention can be used to inhibit the growth rate of cells, and can thus be used, e.g. in the treatment or prevention of diseases or conditions associated with excessive cell growth, such as cancer or inflammatory conditions. Such compounds include, but are not limited to, antibodies, antisense molecules, dominant negative forms of the proteins, and any heterologous compounds that inhibit the expression or the activity of the proteins.

[0624] It will be appreciated that all characteristics and uses of the polynucleotides of SEQ ID NO:133 and 429 and polypeptides of SEQ ID NO:302 and 543, described throughout the present application also pertain to the human cDNA of clone 1000891255, and the polypeptides encoded thereby.

Proteins of SEQ ID NO:271 (Internal Designation Clone ID:493328), Related Clones 153261, 152042, 599054, and 650872 and Related Protein of SEQ ID NO:533.

[0625] The polynucleotides of SEQ ID Nos:102, 103, 104, 105, and 106 and polypeptides of SEQ ID Nos:271, 272, 273, 274, 275 and 533 encode for the HUMAN GENSET BINDING PROTEIN or HGBP-1. Preferred polypeptides comprise the amino acid sequence MKVKIKCWNGVATWLWVANDENCGICRMAFNGCCPDCKVPGDDCPLVWGQCSHCFHM HCILKWLHAQQVQQHCPMCRQEWKFKE. It will be appreciated that all characteristics and uses of the polynucleotides of SEQ ID Nos:102, 103, 104, 105, and 106 and polypeptides of SEQ ID Nos:271, 272, 273, 274, 275 and 533, described throughout the present application also pertain to the human cDNA of clones 493328, 153261, 152042, 599054, and 650872, and the polypeptides encoded thereby.

[0626] The protein of SEQ ID NO: 271 encoded by the extended cDNA SEQ ID NO:102 is the same as a hepatocellular carcinoma associated ring finger protein (EMBL AF247565) and Genset protein in WO0100806 (Genpep accession AX061622) with homology to an anaphase-promoting complex (APC) subunit from Drosophila (Embi accession number AJ251510). In addition, HGBP-1 exhibits the pfam PHD zinc finger signature from positions 33 to 79.

[0627] Zinc binding domains which contain a C₃HC₄ sequence motif are known as RING domains (Lovering, R. et al. (1993) Proc. Natl. Acad. Sci. USA 90:2112-2116). Zinc finger domains are found in numerous zinc binding proteins which are involved in protein-protein and protein-nucleic acid interactions. They are independently folded zinc-containing mini-domains which are used in a modular repeating fashion to achieve sequence-specific recognition of DNA (Klug 1993 Gene 135, 83-92). Such zinc binding proteins are commonly involved in the regulation of gene expression, and usually serve as transcription factors, either by directly affecting transcription or recruiting co-activators or co-repressors (see U.S. Pat. Nos. 5,866,325; 6,013,453 and 5,861,495). PHD fingers are C₄HC₃ zinc fingers spanning approximately 50-80 residues and distinct from RING fingers or LIM domains. They are thought to be mostly DNA or RNA binding domain but may also be involved in protein-protein interactions (for a review see Aasland et al, Trends Biochem Sci 20:56-59 (1995)).

[0628] HGBP-1 or part thereof is a zinc binding protein, which is able to bind nucleic acids, more preferably a transcription factor. Preferred polypeptides of the invention are polypeptides comprising the amino acids of SEQ ID NO: 271 from positions 33 to 79. Other preferred polypeptides of the invention are fragments of SEQ ID NO: 271 having any of the biological activity described herein. The nucleic acid binding activity of the protein of the invention or part thereof may be assayed using any of the assays known to those skilled in the art including those described in U.S. Pat. No. 6,013,453.

[0629] The invention relates to methods and compositions using the protein of the invention or part thereof to bind to nucleic acids, preferably DNA, alone or in combination with other substances. For example, the protein of the invention or part thereof is added to a sample containing nucleic acid in conditions allowing binding, and allowed to bind to nucleic acids. In a preferred embodiment, the protein of the invention or part thereof may be used to purify nucleic acids such as restriction fragments.

[0630] In another preferred embodiment, HGBP polypeptides or parts thereof may be used to visualize nucleic acids when the polypeptide is linked to an appropriate fusion partner, or is detected by probing with an antibody. Thus, HGBP polypeptides can be used to diagnose.

[0631] Alternatively, the protein of the invention or part thereof may be bound to a chromatographic support, either alone or in combination with other DNA binding proteins, using techniques well known in the art, to form an affinity chromatography column. A sample containing nucleic acids to purify is run through the column. Immobilizing the protein of the invention or part thereof on a support advantageous is particularly for those embodiments in which the method is to be practiced on a commercial scale. This immobilization facilitates the removal of the protein from the batch of product and subsequent reuse of the protein. Immobilization of the protein of the invention or part thereof can be accomplished, for example, by inserting a cellulose-binding domain in the protein. One of skill in the art will understand that other methods of immobilization could also be used and are described in the available literature.

[0632] In another embodiment, the present invention relates to compositions and methods using the protein of the invention or part thereof, especially the zinc binding domain, to alter the expression of genes of interest in a target cells. Such genes of interest may be disease related genes, such as oncogenes or exogenous genes from pathogens, such as bacteria or viruses using any techniques known to those skilled in the art including those described in U.S. Pat. Nos. 5,861,495; 5,866,325 and 6,013,453.

[0633] In a further embodiment, the protein of the invention or part thereof may be used to diagnose, treat and/or prevent disorders linked to dysregulation of gene transcription such as cancer and other disorders relating to abnormal cellular differentiation, proliferation, or degeneration, including hyperaldosteronism, hypocortisolism (Addison's disease), hyperthyroidism (Grave's disease), hypothyroidism, colorectal polyps, gastritis, gastric and duodenal ulcers, ulcerative colitis, and Crohn's disease. The invention relates to methods of diagnosing, treating and/or preventing disorders described herein, comprising delivering to a patient, or causing to be present therein, a zinc finger polypeptide which inhibits the expression of a gene enabling the cells to divide. The target could be, for example an oncogene or a normal gene, which is overexpressed in the cancer cells.

ISPG Iron-Sulfur Cluster Protein (Clone ID:1000872335)

[0634] The polynucleotides of SEQ ID NOs:43 and 374 encodes the amino acids sequence of SEQ ID NOs:212 and 491 respectively, an iron-sulfur protein which mediates electron transfer in metabolic reactions, also referred to as ISPG. It will be appreciated that all characteristics and uses of the polynucleotides of SEQ ID NOs 43 and 374 and polypeptides of SEQ ID NOs:212 and 491, described throughout the present application also pertain to the human cDNA of clone 1000872335, and the polypeptides encoded thereby.

[0635] ISPG is an iron-sulfur protein that belongs to the broad family of the 2Fe-2S-type ferredoxins. The 2Fe-2S-type ferredoxins are proteins or domains of around one hundred amino acid residues that bind a single 2Fe-2S iron-sulfur cluster and are found in plants, animals and bacteria. Iron-sulfur cluster proteins are well known classes of proteins and are recognized as ideal devices for accepting, donating, storing and shifting electrons. It will be appreciated by the skilled artisan that stuctural aspect of iron-sulfur proteins have been studied extensively (reviewed in Beinert et al, Nature 1 Aug. 1997, 277:653-659), allowing modifications of the ISPG proteins to fine tune its properties for desired uses while retaining its biological function in mediating electron transfer and possible protein stabilization and iron or sulfide storage functions. The ISPG protein of SEQ ID NO 491 comprisese a glycosaminoglycan attachment site at amino acid positios 34 (SGSG); protein kinase C phosphorylation sites at amino acid positions 14 (SAR), 44 (TTR), and 86 (SGR); N-myristoylation sites at amino acid positions 11 (GGVSAR), 24 (GTXWNR), 31 (GGTSGS), 39 (GVALGT), 106 (GACEAS), a cytochrome c family heme-binding site at amino acid positions 114-119 and an iron-sulfur binding region signature at amino acid positions 108-118.

[0636] In view of its role in electron transfer reactions, ISPG is thought to be involved in a wide variety of metabolic reactions and disorders, and may be useful in the treatment of disorders of metabolism such as obesity, in the detection of toxic compounds, in prediction, diagnosis or treatment of conditions or traits related to drug metabolism or in treatments related to the synthesis of eg. steroid hormones.

[0637] In a preferred example, overexpression or administration of the ISPG protein may be used as a therapeutic treatment for obesity by accelerating the metabolic rate of a subject in need of treatment. There is accumulating evidence to support the hypothesis that a low-energy-output phenotype is at high risk of weight gain and obesity, irrespective of whether this is owing to a low resting metabolic rate and/or physical inactivity. The low-energy-output phenotype is associated with impaired appetite control, which is improved if energy output is increased, serving as the background for pharmacologic stimulation of energy expenditure as a tool to improve the results of obesity management. The ISPG protein and agonists or stimulators thereof may serve as a means to increase electron transfer and hence the metabolic rate of an individual in a similar goal as commonly cited targets such as leptin receptors, the sympathetic nervous system and its peripheral beta-adrenoceptors, selective thyroid hormone derivatives, and stimulation of the mitochondrial uncoupling proteins.

[0638] In addition, iron-sulfur proteins such as ISPG are generally recognized as being capable of several functions that are not of an oxidoreductive nature such as the binding and activation of substrates at the unique iron site (in the catalytic function of aconitase and relates enzymes), and apparently stabilizing radicals in reactions occurring by a free-radical pathway. There is also evidence suggesting that such iron-sulfur clusters can function in coupling electron transfer to proton transport. By binding Cys ligands from different subunits, iron-sulfur clusters effect dimer formation, as in the Fe protein of nitrogenase. Further, by straddling protein structural elements, iron-sulfur clusters are able to stabilize structures that are required for specific functions (eg. endonuclease III of E. coli). Proteins of ISPG's class have also been shown to protect proteins from the attack of intracellular proteases. Finally, proteins of ISPG's class are thought to be capable of serving as storage devices for iron and possibly sulfide.

[0639] Thus, in a few examples, ISPG may be used advantageously as an iron or metal biosensor, for the treatment and/or diagnosis of iron overload disorders, or in applications involving stabilizing target proteins such as for protein production or for mediating protein interactions.

[0640] Additionally, structural aspects of ISPG suggest that it may be capable of mediating steroid hormone synthesis, either in human or animals, or in engineered cell culture systems for the large scale production of hormones. ISPG may be used to act as an adrenal ferredoxin (known as adrenodoxin (ADX)), a vertebrate mitochondrial protein which transfers electrons from adrenodoxin reductase to cytochrome P450scc, which is involved in cholesterol side chain cleavage. Its primary function as a soluble electron carrier between the NADPH-dependent adrenodoxin reductase and several cytochromes P450 makes it an irreplaceable component of the steroid hormones biosynthesis in the adrenal mitochondria of vertebrates.

### Drug Metabolism

[0641] Previous studies have revealed that cytochrome P-450 isozymes are responsible for drug metabolism, and oxidation by P-450 isozymes is a common aspect of the overall clearance of drugs. Further studies have revealed that genetic polymorphism of cytochrome P-450 isozymes underlies a wide spectrum of substrates specificity in drug oxidation. In certain cases, genetic mutation and/or deletion of one critical isozyme gene results in a significant alteration of a phenotype projected on substrate specificity. It has been reported that CYP2D6 oxidizes more than 30 drugs (for example, M. Eichelbaum et al., Pharmacol. Ther., Vol. 46, pp. 377-, 1990). Many anti-cancer drugs are known to be oxygenated by cytochrome P450 enzymes to yield metabolites that are cytotoxic or cytostatic toward tumor cells. These include several commonly used cancer chemotherapeutic drugs, such as cyclophosphamide (CPA), its isomer ifosfamide (IFA), dacarbazine, procarbazine, thio-TEPA, etoposide, 2-aminoanthracene, 4-ipomeanol, and tamoxifen (LeBlanc, G. A. and Waxman, D. J., Drug Metab. Rev. 20:395-439 (1989); Ng, S. F. and Waxman D. J., Intl. J. Oncology 2:731-738 (1993); Goeptar, A. R., et al., Cancer Res. 54:2411-2418 (1994); van Maanen, J. M., et al., Cancer Res. 47:4658-4662 (1987); Dehal, S. S., et al., Cancer Res. 57:3402-3406 (1997); Rainov, N. G., et al., Human Gene Therapy 9:1261-1273 (1998)). Bioreductive metabolism that results in drug activation is also catalyzed by cytochrome P450 enzymes for a variety of anti-cancer drugs. Examples of such drugs include Adriamycin, mitomycin C, and tetramethylbenzoquinone (Goeptar, A. R., et al., Crit. Rev. Toxicol. 25:25-65 (1995); Goeptar, A. R., et al., Mol. Pharmacol. 44:1267-1277 (1993)). Those who have homozygous alteration in this recessive gene, are so-called “poor metabolizers (PMs)” and may suffer from severe side effects due to poor metabolism of drugs (for example, see M. Eichelbaum et al., Pharmacol. Ther., Vol. 46, pp. 377-, 1990). Such genetic alterations occur at rates of from I to 30% in different ethnic populations (for example, L. M. Distlerath et al., J. Biol. Chem., Vol. 260, pp. 9057-,1985).

[0642] The ISPG protein of the invention is thought to be capable of functioning as a soluble electron carrier in the electron transport chain involving one or more of the several available cytochromes P450 enzymes. The ISPG protein may thus be useful in methods of killing neoplastic cells involving P450 (and ISPG) gene transfer and the use of bioreductive drugs that are activated by cytochrome P450, and in methods for evaluating the susceptibility of a sample compound to metabolism with respect to a specific cytochrome P450 isozyme system.

[0643] Thus, in a first aspect, a drug activation/gene therapy strategy has been developed based on a cytochrome P450 gene (“CYP” or “P450”) in combination with a cancer chemotherapeutic agent that is activated through a P450-catalyzed monoxygenase reaction (Chen, L. and Waxman, D. J., Cancer Research 55:581-589 (1995); Wei, M. X., et al., Hum. Gene Ther. 5:969-978 (1994); U.S. Pat. No. 5,688,773, issued Nov. 18, 1997). Presently known drug-enzyme combinations can utilize established chemotherapeutic drugs widely used in cancer therapy. Such methods to obtain enhanced chemosensitivity have been demonstrated both in vitro and in studies using a subcutaneous rodent solid tumor model and human breast tumor grown in nude mice in vivo, and is strikingly effective in spite of the presence of a substantial liver-associated capacity for drug activation in these animals (Chen, L., et al., Cancer Res. 55:581-589 (1995); Chen, L., et al., Cancer Res. 56:1331-1340 (1996)). The P450-based approach also shows significant utility for gene therapy applications in the treatment of brain tumors (Wei, M. X., et al., Human Gene Ther. 5:969-978 (1994); Manome, Y., et al., Gene Therapy 3:513-520 (1996); Chase, M., et al., Nature Biotechnol. 16:444-448 (1998)).

[0644] Although the P450/drug activation system has shown great promise against several tumor types, further enhancement of the activity of this system is needed to achieve clinically effective, durable responses in cancer patients. This requirement is necessitated by two characteristics that are inherent to the P450 enzyme system: (1) P450 enzymes metabolize drugs and other foreign chemicals, including cancer chemotherapeutic drugs, at low rates, with a typical P450 turnover number (moles of metabolite formed/mole P450 enzyme) of only 10-30 per minute; and (2) P450 enzymes metabolize many chemotherapeutic drugs with high Km values, typically in the millimolar range. This compares to plasma drug concentrations that are only in the micromolar range for many chemotherapeutic drugs, including drugs such as CPA and IFA. Thus, current approaches to P450 gene therapy may result in intratumoral drug activation at a low absolute rate and under conditions that are not saturating with respect to drug substrate. Furthermore, since P450 is expressed at a very high level in liver tissue, only a very small fraction of the administered chemotherapeutic drug is metabolized via the tumor cell P450 gene product using the currently available methods for P450 gene therapy (Chen, L. and Waxman, D. J., Cancer Res. 55:581-589 (1995)). As described in U.S. Pat. No. 6,207,648, one enhancement involves introducing a P450 reductase (RED) gene in combination with a cytochrome P450 gene (and thus a P450 gene product) into neoplastic cells, the enzymatic conversion of a P450-activated chemotherapeutic drug to its therapeutically active metabolites is greatly enhanced within the cellular and anatomic locale of the tumor, thereby increasing both the selectivity and efficiency with which neoplastic cells are killed.

[0645] In a preferred embodiment, further enhancements to known prodrug-enzyme strategies may be achieved by introducing an ISPG gene into neoplastic cells, either alone or in combination with a P450 gene and/or a P450 reductase gene. Suitable vectors for the introduction and expression of said ISTG and P450 genes are known to one of skill in the art. The introduction of the ISPG gene and subsequent expression of the ISPG gene product may increase the enzymatic conversion of a P450-activated chemotherapeutic drug to its therapeutically active metabolites. Thus, the invention comprises a method for killing neoplastic cells comprising: (a) infecting the neoplastic cells with a vector for gene delivery, the vector comprising an ISPG gene capable of mediating enzymatic conversion of a chemotherapeutic agent by a P450 enzyme; (b) optionally infecting the neoplastic cells with a vector for gene delivery, the vector comprising a cytochrome P450 gene and/or a gene encoding RED; (b) treating the neoplastic cells with a chemotherapeutic agent that is activated by the product of the cytochrome P450 gene; and (c) killing the neoplastic cells.

[0646] The present invention also provides a reagent composition for use in evaluating drug metabolism by a specific cytochrome P450 isozyme, which comprises a liver microsome lacking said specific P450, said specific P450 isozyme and a carrier material. The liver microsome may be of human source lacking CYP2D6, CYP2C 19, or CYP2A6. The CYP2D6 isozyme, CYP2C 19 isozyme, and CYP2A6 isozyme to be added may be a recombinant CYP2D6-expressing microsome, a recombinant CYP2C 19-expressing microsome, or a recombinant CYP2A6-expressing microsome. The reagent composition may comprise more than one kind of PM microsomes.

[0647] According to the present invention, there can be provided a reagent composition and a method for accurately quantitating the contribution of certain P450 isozymes such as CYP2D6, CYP2C 19, and CYP2A6 in drug metabolism. The present invention provides a method for evaluating the susceptibility of a sample compound to metabolism with respect to a specific cytochrome P-450 isozyme, which comprises contacting the sample compound with a reagent composition prepared by adding said specific cytochrome P-450 isozyme and an ISPG protein to liver microsomes lacking said specific cytochrome P-450 isozyme in a carrier material. ISPG would be useful in order to enhance efficiency of the P-450 isozyme in drug metabolism, thereby effectively amplifying the power of the assay to detect the contribution of a particular P-450 enzyme. In another embodiment the contribution to drug metabolism of a particular P-450 system can be assessed by focussing on a particular iron-sulfur protein associated with said specific P-450 system. In this aspect, the method comprises contacting the sample compound with a reagent composition prepared by adding said specific ISPG protein to liver microsomes lacking said ISPG protein in a carrier material. The method may further comprise (a) incubating a mixture of the sample compound and the reagent composition; (b) extraction of the reaction mixture obtained in Step (a); and (c) analyzing the reaction products isolated in Step (b). For the purposes of quantitating the assay, a plurality of the reagent compositions having different amount of the specific P-450 isozyme or ISPG protein may be subjected to Step (a) to (c), respectively. For example, the specific P-450 isozyme to be used in the method may be selected from CYP2D6, CYP2C19, CYP2A6, CYPIA1 and CYP2E1.

### Iron Biosensor

[0648] Iron-sulfur clusters have been found to serve as sensors of iron, dioxygen, superoxide ion and possibly nitric oxide. Two main mechanisms of sensing have been described. In one example, the oxidation [Fe²S²]¹⁺→[Fe²S²]²⁺ by dioxygen provides the signal for activation of a defense mechanism against superoxide, as observed with the SoxR protein of E. coli, and thus may serve a cytoprotective function (eg. useful for treatment of ischemia, etc.). In an alternative mechanism, oxidative disassembly or reassembly of a cluster provides the controlling signal as in the FNR protein of E. coli.

[0649] In a further detailed example, the ISPG protein of the invention maybe be used as an iron biosensor. An example of an iron biosensor is provided in U.S. Pat. No. 5,516,697 (Kruzel et al.). In summary, ISPG can be immobilized in the vicinity of a device to measure the change in pH, causing a detectable variation of the potential upon the binding of iron.

[0650] In the process of sequestering iron, the sensing element, the ISPG protein is expected to release a number of protons of hydrogen (H+) directly proportional to the atoms of iron bound. The release of protons during the binding of iron by ISPG becomes the operative feature which is measured by the biosensors. The release of protons causes a change in pH and is measured by an ion-selective field effect transistor or by pH sensitive paper. A sample containing iron is placed into a buffered solution, usually water. The sample may be diluted one or more times. In one embodiment of the sensors of the present invention, the release of protons is measured as the variation of the potential on the surface of an ion-selective field effect transistor (an ISFET) (Reviewed in: Biosensor Technology, edited by Buck et al. and published by Marcel Decker, Inc., 1990, entitled “Solid State Potentiometric Sensors” by Jiri Janata, pp 17-34). In another embodiment of the present invention, the protons released upon binding of iron by ISPG are detected by the change in pH using pH sensitive paper. Preferably, the iron selective element (ISPG) is incorporated in close proximity or integrated with the signal transducer, to give a reagentless sensing system for iron. Since the signal can be amplified, only small quantities of ISPG are needed for detection of iron. The ISFET is modified by immobilizing ISPG on the surface of the ISFET or by a disposable membrane with immobilized ISPG that is in close proximity to the ISFET by attaching the ISPG-modified membrane to the surface of the ISFET. A sample containing iron, for example a biological sample such as body fluid from a mammal, particularly a human, is then contacted with the ISPG -modified ISFET.

[0651] In order to produce an ISPG-modified ISFET as an independent sensor, an existing system which uses an ISFET designed to measure pH can be modified. Systems which presently use an ISFET to measure pH are the Sentron 2001 pH system, manufactured by Integrated Sensor Technology, Federal Way, Wash.; the Corning 360i pH system, manufactured by Corning Incorporated, Corning N.Y.; or Orion 610 pH system, manufactured by Orion Analytical Technology, Inc., Boston, Mass. The modification required to measure the amount of iron in a sample is either to place an immobilized layer of ISPG on the ISFET of such a system or, alternatively, to provide a ISPG-modified membrane, i.e. a membrane coated with ISPG, which will be in close proximity to the existing ISFET so as to detect the release of protons when the ISPG binds iron in a sample and records the change in potential.

[0652] Iron sensitive biosensors (as well as treatments for iron overload disorders) are extremely valuable It is estimated that 30,000,000 Americans suffer from different types of iron related disorders, including a substantial proportion with profound iron deficiency syndrome. Detection of bioaccessible iron is one of the most important measurements that doctors can use for early detection if iron deficiency, iron overload or other types of immunological disorders. To date iron is measured through a combination of blood tests that detect iron and iron binding capacity of transferrin, the protein that transports iron through the body. The current technology involves very sophisticated instrumentation which make this analysis prohibitively expensive and often requires qualified personnel to analyze the sample. Therefore, there is a need for the direct assay of iron that combines simplicity and economics. ISPG may therefore be advantageously used in development of a biosensor for detecting the amount of iron in a sample.

### Steroid Biosynthesis

[0653] As noted above, ISPG may be used as an adrenal ferredoxin (known as adrenodoxin (ADX)), a vertebrate mitochondrial protein which transfers electrons from adrenodoxin reductase to cytochrome P450scc, which is involved in cholesterol side chain cleavage and is an irreplaceable component of the steroid hormones biosynthesis in the adrenal mitochondria.

[0654] In therapeutic embodiments, ISPG may have particular importance in treatment of disorders where it is desired to increase the level of steroid hormone synthesis. As P450scc has a critical role in synthesis of the conversion of cholesterol into pregnenolone, ISPG may be used as a limiter or enhancer of steroid synthesis. In but one example, evidence has been shown that cytochrome P450scc activity in the human placenta is limited by the supply of electrons to the P450scc. Furthermore, Tuckey et al. Eur. J. Biochem. July 1999;263(2): 319-325 have shown that p450scc activity can be increased considerably by adding adrenodoxin reductase and adrenodoxin. Thus, ISPG may be useful in the treatment of reproductive disorders by augmenting the electron supply to P450scc, and thus increasing the level of progesterone synthesis. Accordingly, in another example, ISPG may be used to limit steroid synthesis, whether for therapeutic or for research uses.

[0655] ISPG may also be used in biological steroid synthesis processes for the production of steroid hormones. For example, Duport et al, Nat Biotechnol February 1998; 16(2): 186-9 report a system for self-sufficient biosynthesis of pregnenolone and progesterone in engineered yeast wherein the first two steps of the steroidogenic pathway were reproduced in Saccharomyces cerevisiae. Engineering of sterol biosynthesis by disruption of the delta 22-desaturase gene and introduction of the Arabidopsis thaliana delta 7-reductase activity and coexpression of bovine side chain cleavage cytochrome P450, adrenodoxin, and adrenodoxin reductase, lead to pregnenolone biosynthesis from simple carbon source. As ISPG is thought to be capable of functioning as an adrenodoxin protein, ISPG may be used as a function substitute in the system of Duport et al for adrenodoxin.

MTG (METALLOTHIONEIN) (Clone ID:654627)

[0656] SEQ ID NOS 96 and 413 and clone FL 11:654627_{—}182-5-3-0-F10-F encode the polypeptide of SEQ ID NOs:265 and 527 respectively, a metallothionein protein which binds heavy metal. Said polypeptide of the invention is also referred herein as MTG. It will be appreciated that all characteristics and uses of the polynucleotides of SEQ ID NOs:96 and 413 and polypeptides of SEQ ID NO:265 and 527, described throughout the present application also pertain to the human cDNA of clone 654627, and the polypeptides encoded thereby.

[0657] Metallothioneins (MT) [1,2,3] are small proteins which bind heavy metals such as zinc, copper, cadmium, nickel, etc., through clusters of thiolate bonds. MT's occur throughout the animal kingdom and are also found in higher plants, fungi and some prokaryotes and are thought to play a role in metal detoxification or in the metabolism and homeostasis of metals. On the basis of structural relationships MT's have been subdivided into three classes. Class I includes mammalian MT's as well as MT's from crustacean and molluscs, but with clearly related primary structure. Class II groups together MT's from various species such as sea urchins, fungi, insects and cyanobacteria which display none or only very distant correspondence to class I MT's. Class III MT's are atypical polypeptides containing gamma-glutamylcysteinyl units.

[0658] Vertebrate class I MT's such as the MTG protein of the invention are proteins of typically 60 to 68 amino acid residues, 20 of these residues are cysteines that bind to 7 bivalent metal ions. As a signature pattern we chose a region that spans 19 residues and which contains seven of the metal-binding cysteines, this region is located in the N-terminal section of class-I MT's. A consensus pattern for class I Mrs is as follows: C-x-C-[GSTAP]-x(2-C-x-C-x(2)-C-x-C-x(2)-C-x-K.

[0659] The MTG protein of SEQ ID NO 527 has a metallothionein domain (Prosite ref. PS00203) at amino acid positions 13-31; an N-glycosylation site at position 4 (NCSC), a protein kinase C phosphorylation site at amino acid positions 18 (SCK), 28 (SCK) and 55 (SQR); a casein kinase II phosphorylation site at amino acid position 41 (TLVD); an N-myristoylation site at amino acid positions 10 (GVSCTC); and a prokaryotic membrane lipoprotein lipid attachment site at amino acid position 3 (PNCSCAAGVSC).

### Therapeutics

[0660] Discovery of new proteins related to metallothioneins, and the polynucleotides that encode them, satisfies a need in the art by providing new diagnostic or therapeutic compositions useful in diagnosing and treating heavy metal toxicity, cancer, inflammatory disease and immune disorders.

[0661] Acute or chronic exposure to heavy metals such as lead, arsenic, mercury or cadmium leads to a variety of diseases and disorders involving neuromuscular, CNS, cardiovascular, and gastrointestinal effects. MTs may play a role in the prevention or alleviation of these conditions. In addition, MTs are transcriptionally regulated by glucocorticoids, which suggests that MTs have a direct role in the effects of glucocorticoids to treat inflammatory disease, immune disorders, and cancer. It is therefore thought that MTG may have important applications in the treatment of inflammatory disease, immune disorders, and cancer as well as in cytoprotection in a variety of therapeutic applications.

[0662] In one preferred example, the MTG nucleic acids and protein may be used for suppressing the production of sunburn cells which is applicable in various manners with minimal adverse side effects, a method of inducing metallothionein, a method of treating skin diseases and a method of screening ultraviolet rays, and further relates to cosmetic compositions and UV screening compositions.

[0663] Conventionally, steroids and zinc oxide formulations have been topically used as medicines for treating skin diseases such as dermatitis, sunburn, neurodermatitis, eczema and anogenital pruritus. Steroids, however, have been difficult to administer in large quantities for a prolonged period due to their strong adverse side effects. Zinc oxide formulations, which have local astringent action, involve problems with respect to the manufacture of pharmaceuticals, since they are insoluble in water and are not usually administered internally.

[0664] Zinc, one of the indispensable trace metals in the living body, is known to participate in the development of sexual organs, promotion of wound healing and is also known to be a component of a metalloenzyme, an accelerator for dehydrogenase, and to have various functions such as activating the immune system. Zinc is further known to be an inducing factor of metallothionein (MT), a metal-combining protein. It is reported that MT functions as a scavenger of free radicals which are generated at the onset of inflammations [“Dermatologica”, Hanada, k., et al., 179 (suppl. 1) 143 (1989)].

[0665] As proposed in U.S. Pat. No. 5,582,817 (Otsu et al), MTG may be useful in treatment of dermatological inflammations caused by external irritative stimulants, such as sunburn or the like, where MTG could act to quench the free radicals released from leukocytes, especially granulocytes which gather at the inflamed region, and thereby exhibit an anti-oxidation action to diminish cell damage, especially to normal lymphocytes, to activate the immune system and further to prevent the accelerated aging of the skin. Formation of sunburn cells (SBCs) could be suppressed by administering zinc for inducing MTG to be present, or to increase MTG in the epidermal keratinous layer. Anti-oxidation action of MTG can also be useful in the treatment of skin problems resulting from radiation therapy by X rays, alpha rays, beta rays, gamma rays, neutron rays and accelerated electron rays.

[0666] Various zinc compounds have been studied by Otsu et al (supra) with respect to their pharmacological activities, who reported that zinc salts or zinc complexes of a certain compound have an excellent action of inducing metallothionen (MT) and suppressing sunburn cell (SBC) production due to UV rays, and thereby useful as components of cosmetic compositions or medicines for purposes of ameliorating sunburn, preventing sunburn, ameliorating sufferings from skin diseases and ameliorating other radiation induced disorders, leading to completion of the invention.

[0667] There are two different types of dermatological reactions caused by sunlight, one is an acute inflammatory change in the skin called sunburn, and the other is a subsequent melanin pigmentation called suntan. The light having a wave length in the range of 320 nm or less, called UVB, induces sunburn and is responsible for erythematous change. The erythemic reaction caused by UV rays, as opposed to a burn injury, does not occur immediately after the exposure to the sunlight, but rather occurs after a latent period of several hours. When sunburned skin is histopathologically examined, various degrees of inflammatory changes are recognized in the epidermis and dermis depending on the dose of radiation. Among such changes, a notable one is the generation of so-called sunburn cells (SBC) in the epidermis. A histologically stained tissue sample presents strongly and acidophilically stained cells which have pyknotic nuclei. This phenomenon indicates the necrosis of epidermal cells (“Fragrance Journal”, 9, 15-20 (1991). In order to prevent sunburn, para-aminobenzoic acid derivatives, cinnamic acid derivatives or the like UV absorbers mentioned above are used, but their UV absorbing effects are not necessarily satisfactory. What is more, they raise problems of cumbersome handling upon use, poor stability, low compatibility with other components of the composition, and also involve unsolved problems in water-resistance and oil-resistance.

[0668] In the field of medicines for the treatment of skin diseases, development of medicines which have minimal adverse side effects, and which have novel functions obtainable by both external and internal administrations has been desired. Also, in the field of the therapy and prevention of radiation disorders, medicines which can suppress and cure the disorders caused by oxidative reactions have been desired. Lastly, in the field of the manufacture of cosmetics, cosmetics which overcome the above-mentioned problems such as handling upon use and stability of the composition have been desired. Accordingly, the present invention encompasses providing therapeutic agents for treating skin diseases having the above-mentioned characteristics, wherein said agents are capable of inducing MTG for suppressing the formation of sunburn cells, and for use in cosmetic compositions. Also encompassed are methods of screening for therapeutic agents for treating skin diseases comprising bringing a test compound into contact with a cell, tissue or animal model of disease, and detecting induction of MTG expression or function.

### Gene Expression Systems

[0669] The MTG nucleic acid and proteins of the invention may also be advantageously used in the production of recombinant proteins as biopharmaceutical products at commercial scale.

[0670] Previously, genes have been extensively expressed in mammalian cell lines, particularly in mutant Chinese Hamster Ovary (CHO) cells deficient in the dihydrofolate reductase gene (dhfr) as devised by the method of Urlaub et al, PNAS U.S.A. 77, 42164220, 1980. A variety of expression systems have been used. Many vectors for the expression of genes in such cells are therefore available. Typically, the selection procedures used to isolate cells transformed with the expression vectors rely on using methotrexate to select for transformants in which both the dhfr and the target genes are coamplified. The dhfr gene, which enables cells to withstand methotrexate, is usually incorporated in the vector with the gene whose expression is desired. Selection of cells under increasing concentrations of methotrexate is then performed. This leads to amplification of the number of dhfr genes present in each cell of the population, as cells with higher copy numbers withstand greater concentrations of methotrexate. As the dhfr gene is amplified, the copy number of the gene of interest increases concomitantly with the copy number of the dhfr gene, so that increased expression of the gene of interest is achieved. Unfortunately, these amplified genes have been reported to be variably unstable in the absence of continued selection (Schimke, J. Biol. Chem. 263, 5989-5992, 1988). This instability is inherent to the presently available expression systems of CHO dhfr.sup.- cells. For many years, several promoters have been used to drive the expression of the target genes such as the SV40 early promoter, the CMV early promoter and the SR.alpha. promoter. The CMV and SR.alpha. promoters are claimed to be the strongest (Wenger et al, Anal. Biochem. 221, 416-418, 1994).

[0671] In one report, the .beta.-interferon promoter has also been used to drive the expression of the .beta.-interferon gene in the mutant CHO dhfr.sup.- cells (U.S. Pat. No. 5,376,567). In this system, however, the selected CHO dhfr⁻ cells had to be superinduced by the method of Tan et al (Tan et al, PNAS U.S.A. 67, 464471, 1970; Tan et al, U.S. Pat. No. 3,773,924) to effect a higher level of .beta.-interferon production. In this system a significant percentage of the superinduced .beta.-interferon produced by the CHO dhfr- cells was not glycosylated. The mouse metallothionein gene (mMT1) promoter has also been used for the expression of beta-interferon genes in CHO cells, BHK and LTK.sup.- mouse cells (Reiser et al 1987 Drug Res. 37, 4, 482485). However, the expression of .beta.-interferon with this promoter was not as good as the SV40 early promoter in CHO cells. Further, .beta.-interferon expression from these cells mediated by the mMT1 promoter was inducible by heavy metals. Heavy metals are however extremely toxic to the cells and this system was therefore abandoned. Instead, Reiser et al used the CHO dhfr- expression system in conjunction with the SV40 early promoter (Reiser et al, Drug Res. 37,4, 482485 (1987) and EP-A-0529300) to produce .beta.-interferon in CHO dhfr- cells as derived by the method of Urlaub et al (1980).

[0672] As described in U.S. Pat. No. 6,207,146 (Tan et al) beta.-interferon was expressed in wild-type CHO cells using a metallothionein based system. MTG may thus be used in similar applications so as to provide a system for expression of recombinant proteins. Tan et al demonstrates wild-type CHO cells transfected with a vector comprising a .beta.-interferon gene under the control of a mouse sarcoma viral enhancer and mouse metallothionein promoter (MSV-mMT1), a neo gene under the control of promoter capable of driving expression of the neo gene in both E. coli and mammalian cells and a human metallothionein gene having its own promoter. Transfected cells capable of expressing .beta.-interferon were selected by first exposing cells to geneticin (antiobiotic G418) and thus eliminating cells lacking the neo gene and then exposing the surviving cells to increasing concentrations of a heavy metal ion.

[0673] The heavy metal ion enhanced the MSV-mMT1 promoter for the .beta.-interferon gene, thus increasing .beta.-interferon expression. The heavy metal ion also induced the human metallothionein gene promoter, causing expression of human metallothionein. The human metallothionein protected the cells against the toxic effect of the heavy metal ion. The presence of the heavy metal ion ensured that there was continual selection of cells which had the transfecting vector, or at least the .beta.-interferon gene and the human metallothionein gene and their respective promoters, integrated into their genome.

[0674] The selected cells that had been successfully transfected expressed .beta.-interferon. Expression was surprisingly improved when the cells were cultured in the presence of Zn²⁺. The .beta.-interferon had improved properties, in particular a higher bioavailability, than prior .beta.-interferons.

[0675] These findings have general applicability and suggest that the MTG gene of the present invention may be used accordingly in expression systems. Accordingly, the present invention provides a nucleic acid vector comprising:

[0676] (i) a coding sequence which encodes a protein of interest and which is operably linked to a promoter capable of directing expression of the coding sequence in a mammalian cell in the presence of a heavy metal ion; (ii) a first selectable marker sequence which comprises an MTG gene of the invention and which is operably linked to a promoter capable of directing expression of the MTG gene in a mammalian cell in the presence of a heavy metal ion; and optionally (iii) a second selectable marker sequence which comprises a neo gene and which is operably linked to a promoter capable of directing expression of the neo gene in a mammalian cell;

CDPG (Glycosyl Phosphatidylinositol-Linked Glycoprotein) (Clone ID:1000902917)

[0677] SEQ ID NOS 3 and 341 and clone FL11:1000902917_{—}223-524-0-G3-F encode the polypeptide of SEQ ID NOS 172 and 458 respectively, a glycosyl phosphatidylinositol-linked glycoprotein protein which is thought to be a signal transducing polypeptide expressed in lymphoid, myeloid, and erythroid cells. Said polypeptide comprises a CD24 signal transducing domain as well as a GPI-anchor of the invention is also referred herein as CDPG. CDPG is believed to be highly glycosylated, and it is expected that CDPG molecular weight will vary among cell types and cell developmental stage due to differences in glycosylation patterns, providing further specificity in its use as a therapeutic target. It will be appreciated that all characteristics and uses of the polynucleotides of SEQ ID NOs: 3 and 341 and polypeptides of SEQ ID NO: 172 and 458, described throughout the present application also pertain to the human cDNA of clone 1000902917, and the polypeptides encoded thereby.

[0678] It is suggested that CDPG may have a specific role to play in early thymocyte development. The CDPG protein is thought to be extensively o-glycosylated may be capable of modulating b-cell activation responses. As a signaling transducer, the CDPG polypeptide's signal transducing function may in some embodiments be triggered by the binding of a lectin-like ligand to the CD24 domain carbohydrates, and the release of second messengers allowing signaling. The CDPG polypeptide is thought to have important functions in regulating the differentiation and/or growth of lymphoid, myeloid, and erythroid cells, including specifically promoting antigen dependent proliferation of b-cells, and preventing their terminal differentiation into antibody-forming cells.

[0679] Additionally, based on a growing body of evidence characterizing the CD24 domain function, it is proposed that CDPG may have a role as a potent stimulator of neurite outgrowth, and thus may be useful in the treatment of central nervous system disorders.

[0680] Fragments of CDPG may also be useful, eg. GPI-anchor domain for example in the development of soluble T-cell receptors (U.S. Pat. No. 6,080,840) or any suitable application where a temporally controlled solubilization of a protein of interest is desired. For example, a fragment comprising the CDPG GPI-anchor domain can be used in the production of soluble molecules by replacing the transmembrane domains of the cDNA of a protein of interest with a sequence comprising the CDPG glycosylphosphatidyl inositol (GPI) linkage. These chimeric cDNAs are then transferred into an expression vector containing a strong promoter and a mutant (e.g. DHFR) gene allowing high levels of transcriptional expression and amplification of the gene. These chimeric genes are then cotransfected into a selected cell type, preferably lacking the endogenous protein of interest, and transfectants are selected and can also be screened with antibodies for the protein of interest. These GPI linked proteins of interest can then be solubilized by cleavage with the enzyme phosphatidyl inositol specific phospholipase C (PI-PLC) and purified/concentrated from the supernatant (e.g. by passage over a protein of interest-reactive antibody affinity column).

### Therapeutics

[0681] CDPG or inhibitors of CDPG may be used in the treatment of any disorder where it is desired to regulate B-cell proliferation or differentiation. CDPG or inhibitors thereof may be useful in the treatment of B-cell neoplasms, a heterogeneous group of diseases characterized by different maturation states of the B-cell, which are related to the aggressiveness of the disorder. Chronic lymphocytic leukemia (CLL) is characterized by proliferation and accumulation of B-lymphocytic leukemia (BLL) is characterized by proliferation and accumulation of B-lymphocytes that appear morphologically mature but are biologically immature. This disorder accounts for 30% of leukemias in Western countries. The disorder is characterized by proliferation of biologically immature lymphocytes, unable to produce immunoglobulins, which cause lymph node enlargement. As a regulator of B-cell proliferation and differentiation, CDPG and/or inhibitors of CDPG may be useful for inhibiting proliferation of leukemic B-cells in CLL patients.

[0682] CDPG may also be useful in the modulation of cell growth in the CNS. CD24 is known to be highly expressed in neurons and has been demonstrated as capable of inhibiting neurite outgrowth of dorsal root ganglion neurons while promoting neurite outgrowth of cerebellar neurons via interaction with an L1 protein.

### Selectable Cell Markers

[0683] In one aspect, the CDPG polypeptide may be used as a selectable cell marker and to a method of using the selectable marker to identify a cell. Viruses such as recombinant retroviruses have been used as a vehicle for gene transfer based on their potential for highly efficient infection and non-toxic integration of their genome into a wide range of cell types. The transfer of exogenous genes into mammalian cells may be used, for example in gene therapy to correct an inherited or acquired disorder through the synthesis of missing or defective gene products in vivo. The expression of exogenous genes in cells may be useful in somatic gene therapy, to correct hereditable disorders at the level of the gene. Hemopoietic stem cells are particularly suited to somatic gene therapy as regenerative bone marrow cells may be readily isolated, modified by gene transfer and transplanted into an immunocompromised host to reconstitute the host's hemopoietic system.

[0684] Gene therapy involving hone marrow transplant with recombinant primary hemopoietic stem cells requires efficient gene transfer into the stem cells. As a very small number of primary stem cells can reconstitute the entire host hemopoietic system it is important that the transferred gene be efficiently expressed in the recombinant stem cells transferred. The transfer of foreign genes into a reconstituted host hemopoietic system has been limited by the availability of a selectable marker which permits the rapid and non-toxic selection of cells which are efficiently expressing the transferred gene. Currently available selection markers may not be suitable for primary hemopoietic stem cells since they may alter the proliferative ability or biological characteristics of the cells. The transfer of foreign genes into a reconstituted host hemopoietic system has also been limited by the availability of a viral vector capable of expression in hemopoietic stem cells, especially where more than one transcriptional unit is present in the vector (Botrell, D. R. L. et al., 1987, Mol. Biol. Med. 4:229).

[0685] U.S. Pat. No. 5,804,177 (Humphries et al) has demonstrated that the cell surface protein CD24 (also M1/69-J11d heat stable antigen) can be used as a dominant marker in a recombinant viral vector. A nucleotide sequence encoding the cell surface protein CD24 in a recombinant viral vector was used to infect hematopoietic stem cells and cells infected with the recombinant viral vector were rapidly and non-toxically selected for in vitro using fluorescence activated cell sorting (FACS), demonstrating a good correlation between proviral copy number and expression of selectable marker.

[0686] CD24 is a signal transducing molecule found on the surface of most human B cells that can modulate their responses to activation signals, and is structurally closely related to CDPG. The CD24 cDNA (approximately 300 bps) has been cloned (Kay, R. et al, 1991, J. Immunol. 147:1412) and encodes a mature peptide of only 31 to 35 amino acids that is extensively glycosylated and attached to the outer surface of the plasma membrane by a glycosyl phosphatidylinositol lipid anchor. M1/69-J11d heat stable antigen is a genetically similar homologous murine peptide widely expressed on a variety of hemopoietic cell types (Kay, R. et al., 1990, J. Immunol. 145:1952).

[0687] It is thus proposed that a recombinant viral vector can be used to successfully transfer and express the CDPG gene in primitive hemopoietic stem cells such that they are able to repopulate lethally irradiated recipients. Preferably foreign CDPG antigen expression in repopulated animals persists post transplantation such that the biological function of the repopulated hemopoietic cells is not affected by the expression of the CDPG antigen. CDPG may subsequently be found to be expressed in any or all of hemopoietic lineages including granulocytes, macrophages, pro-erythrocytes, erythrocytes and T and B lymphocytes. Therefore, the cell surface protein CDPG may be particularly useful as a marker for hematopoietic stem cells capable of repopulation in vivo and as a selectable marker in gene therapy. The recombinant viral vectors also have the advantage that the nucleotide sequence encoding the marker is very small, leaving a large amount of space for the insertion of additional genes of interest such as those coding for exogenous genes.

[0688] In a preferred embodiment of the invention a recombinant viral vector is used to introduce the nucleotide sequence into the cell. Preferably, the CDPG nucleotide sequence is operatively linked to one or more regulatory elements. The recombinant viral vector of the invention may be used as a marker for an exogenous gene to be expressed in a host cell. The invention further provides a method of identifying a cell and progeny thereof comprising: providing a cell; infecting the cell with a recombinant viral vector of the invention under suitable conditions to allow expression of the cell surface protein CDPG on the cell; and, identifying the cell and progeny thereof by detecting expression of the cell surface protein CDPG on the cell or progeny thereof. Cells infected with a recombinant viral vector of the invention and expressing the cell surface protein may be transplanted into a host, and the cell and progeny thereof may be identified after transplantation by removing biological samples from the host, and assaying for cells expressing the cell surface protein. A recombinant viral vector of the invention may be directly introduced into a host.

### Enriching Stem Cell Compositions

[0689] As it is proposed that CDPG is involved in early thymocyte development and is found on the cell surface due to its GPI-anchor, CDPG nucleic acids and polypeptides of the present invention may also be used to obtain novel antibody compositions useful for preparing cell preparations containing human hematopoietic cells.

[0690] There is a continued interest in developing stem cell purification techniques. Pure populations of stem cells will facilitate studies of hematopoiesis. Transplantation of hematopoietic cells from peripheral blood and/or bone marrow is also increasingly used in combination with high-dose chemo- and/or radiotherapy for the treatment of a variety of disorders including malignant, nonmalignant and genetic disorders. Very few cells in such transplants are capable of long-term hematopoietic reconstitution, and thus there is a strong stimulus to develop techniques for purification of hematopoietic stem cells. Furthermore, serious complications and indeed the success of a transplant procedure is to a large degree dependent on the effectiveness of the procedures that are used for the removal of cells in the transplant that pose a risk to the transplant recipient. Such cells include T lymphocytes that are responsible for graft versus host disease (GVHD) in allogenic grafts, and tumour cells in autologous transplants that may cause recurrence of the malignant growth.

[0691] Hematopoietic cells have been separated on the basis of physical characteristics such as density and on the basis of susceptibility to certain pharmacological agents which kill cycling cells. The advent of monoclonal antibodies against cell surface antigens has greatly expanded the potential to distinguish and separate distinct cell types. There are two basic approaches to separating cell populations from bone marrow and peripheral blood using monoclonal antibodies. They differ in whether it is the desired or undesired cells which are distinguished/labeled with the antibody(s). In positive selection techniques the desired cells are labeled with antibodies and removed from the remaining unlabeled/unwanted cells. In negative selection, the unwanted cells are labeled and removed. Antibody/complement treatment and the use of immunotoxins are negative selection techniques, but FACS sorting and most batch wise immunoadsorption techniques can be adapted to both positive and negative selection. In immunoadsorption techniques cells are selected with monoclonal antibodies and preferentially bound to a surface which can be removed from the remainder of the cells e,g. column of beads, flasks, magnetic particles. Immunoadsorption techniques have won favor clinically and in research because they maintain the high specificity of targeting cells with monoclonal antibodies, but unlike FACSorting, they can be scaled up to deal directly with the large numbers of cells in a clinical harvest and they avoid the dangers of using cytotoxic reagents such as immunotoxins, and complement.

[0692] Current positive selection techniques for the purification of hematopoietic stem cells target and isolate cells which express CD34. However, positive selection procedures suffer from many disadvantages including the presence of materials such as antibodies and/or magnetic beads on the CD34⁺ cells, and damage to the cells resulting from the removal of these materials.

[0693] Negative selection has been used to remove minor populations of cells from clinical grafts. These cells are either T-cells or tumour cells that pose a risk to the transplant recipient. The efficiency of these purges varies with the technique and depends on the type and number of antibodies used. Typically, the end product is very similar to the start suspension, missing only the tumor cells or T-cells.

[0694] As described in U.S. Pat. No. 5,877,299, Thomas et al developed a negative selection technique that uses an antibody composition containing antibodies specific for glycophorin A, CD3, CD24, CD16, CD14 and optionally CD45RA, CD36, CD2, CD19, CD56, CD66a, and CD66b, which reportedly gave a cell preparation highly enriched for human hematopoietic and progenitor cells. Maximum enrichment of early progenitor and stem cells (CD34⁺, CD38⁻ cells) was observed when anti-CD45R and anti-CD36 were included in the antibody composition. However, as CDPG is proposed as acting in early thymocyte development, CDPG may be used advantageuously to develop more effective antibody compositions for selecting hematopoietic stem cells. Accordingly, the invention encompasses antibodies specific for CDPG polypeptides of the invention and antibody compositions comprising, consisting of or consisting essentially of antibodies specific for CDPG, glycophorin A, CD3, CD24, CD16, CD14 and optionally CD45RA, CD36, CD2, CD19, CD56, CD66a, and CD66b.

[0695] Use of the antibody composition comprising CDPG in a negative selection technique to prepare a cell preparation which is enriched for hematopoietic stem cells and progenitor cells may offer significant advantages over conventional techniques. The antibody composition is applied in one step to a sample of peripheral blood, bone marrow, cord blood or frozen bone marrow, preferably without additional enrichments steps which could result in loss of, or damage to, progenitor and stem cells.

PRSG (Proline-Rich Calcium-Binding Protein) and HSTG (Basic Histidine Rich Salivary Gland Peptide) (Clone ID:338112 and 1000839315 Respectively)

[0696] SEQ ID NOS 22 and 358 and clone FLI 1: 1000839315_{—}220-26-1-0-F3-F encode the polypeptide of SEQ ID NOS 191 and 475 respectively, a basic histidine rich salivary gland peptide referred to herein as HSTG and expected to have potent antimicrobial properties. Preferably, the amino acid sequence of HSTG (SEQ ID NO 475) comprises a tyrosine at amino acid position 40. The HSTG protein also comprises a Pattern-DE: Protein kinase C phosphorylation site at amino acid position 51 (SSK). It will be appreciated that all characteristics and uses of the polynucleotides of SEQ ID NOs: 22 and 358 and polypeptides of SEQ ID NO: 191 and 475, described throughout the present application also pertain to the human cDNA of clone 1000839315, and the polypeptides encoded thereby.

[0697] SEQ ID NOS 8 and 345 and clone FL11:338112_{—}174-1-1-0-A11-F encode the polypeptide of SEQ ID NOS 177 and 462 respectively, a proline-rich protein referred to herein as PRSG believed to be a component of saliva and a calcium binding protein also possessing potent antimicrobial properties. Preferably, the amino acid sequence of PRSG (SEQ ID NO 462) comprises a proline residue at amino acid position 96, an arginine residue at amino acid position 100, a glutamine residue at amino acid positoin 102, and/or a glycine residue at amino acid position 103. The PRSG protein also comprises a casein kinase II phosphorylation site at amino acid positions 15 (SAQD), 24 (SQED), and 59 (SAGD) and an N-myristoylation site at amino acid position 52 (GGQQSQ). It will be appreciated that all characteristics and uses of the polynucleotides of SEQ ID NOs:8 and 345 and polypeptides of SEQ ID NO: 177 and 462, described throughout the present application also pertain to the human cDNA of clone 338112, and the polypeptides encoded thereby.

[0698] A study of saliva and its tooth-protective components reveals at least four important functions of saliva: (1) buffering ability, (2) a cleansing effect, (3) antibacterial action, and (4) maintenance of a saliva supersaturated in calcium phosphate. Several salivary constituents serve one or more of these functions. Research has yielded important information about organic and inorganic secretory products. It is also clear that saliva as a unique biologic fluid has to be considered in its entirety to account fully for its effects on teeth. Saliva is greater then the sum of its parts. One reason for this is that salivary components display redundancy of function, each often having more than one function. This redundancy, however, does not imply that proteins that share functional roles all contribute to the same degree. For instance, when comparing proteins that inhibit calcium phosphate precipitation, statherin and acidic proline-rich proteins are most potent, whereas histatins, cystatins, and mucins appear to play lesser roles. The complex interaction between proteins is another major factor contributing to saliva's function. In this regard, heterotypic complexes of various proteins have been shown to form on hydroxyapatite. Mucin binding to other salivary proteins, including proline-rich proteins, histatins, cystatins, and statherin, is well documented. The complexes, whether adsorbed to the tooth surface or in saliva, have important implications for bacterial clearance, selective bacterial aggregation on the tooth surface, and control of mineralization and demineralization. Finally, proteolytic activity of saliva generates numerous products whose biologic activities are often different from their parent compounds. The ability of saliva to deliver fluoride to the tooth surface constantly makes salivary fluoride an important player in caries protection largely by promoting remineralization and reducing demineralization. Saliva is well adapted to protection against dental caries. Saliva's buffering capability; the ability of the saliva to wash the tooth surface, to clear bacteria, and to control demineralization and mineralization; saliva's antibacterial activities; and perhaps other mechanisms all contribute to its essential role in the health of teeth. The fact that the protective function of saliva can be overwhelmed by bacterial action indicates the importance of prevention and therapy as in other infectious diseases. With knowledge of salivary components and their interactions, the use of modified oral molecules as therapeutic agents may become a important contributor to oral health.

[0699] Proline-rich proteins are major components of parotid and submandibular saliva in humans as well as other animals. They can be divided into acidic, basic and glycosylated proteins. The proline-rich proteins are apparently synthesized the acinar cells of the salivary glands and their phenotypic expression is under complex genetic control. The acidic proline-rich proteins will bind calcium with a strength which indicates that they may be important in maintaining the concentration of ionic calcium in saliva. Moreover they can inhibit formation of hydroxyapatite, whereby growth of hydroxyapatite crystals on the tooth surface in vivo may be avoided. Both of these activities as well as the binding site for hydroxyapatite are located in the N-terminal proline-poor part of the protein.

[0700] Basic histidine rich salivary gland peptides such as the peptide of SEQ ID NO. 191 and 475, also referred to as histatins are a group of electrophoretically distinct histidine-rich polypeptides with microbicidal activity found in human parotid and submandibular gland secretions. Histatins 1, 3, and 5 are homologous proteins that consist of 38, 32, and 24 amino acid residues, respectively, that have been shown to kill the pathogenic yeast, Candida albicans. More recently histatins 2, 4, 6, and 7-12 were isolated and characterized Troxier RF et al, J Dent Res January 1990;69(1):2-6. Histatin 2 was found to be identical to the carboxyl terminal 26 residues of histatin histatin 4 was found to be identical to the carboxyl terminal 20 residues of histatin 3; and histatin 6 was found to be identical to histatin 5, but contained an additional carboxyl terminal arginine residue. The amino acid sequences of histatins 7-12 formally corresponded to residues 12-24, 13-24, 12-25, 13-25, 5-11, and 5-12, respectively, of histatin 3, but could also arise proteolytically f histatin 5 or 6. Troxler et al provides further guidance on the structural elements and relationship of histatins to one another in the context of their genetic origin, biosynthesis and secretion into the oral cavity, and potential as reagents in anti-candidal studies. The HSTG polypeptide and fragments thereof are therefore expected to have valuable properties and uses in antimicrobial applications, particularly in antifungal applications. Supporting such uses is a considerable body of evidence, including MacKay B J et al, Infect Immun. June 1984;44(3):695-701, Growth-inhibitory and bactericidal effects of human parotid salivary histidine-rich polypeptides on Streptococcus mutants; MacKay B J et al, Infect Immun. June 1984;44(3):688-94, Isolation of milligram quantities of a group of histidine-rich polypeptides from human parotid saliva; Pollock J J et al, Infect Immun. June 1984;44(3):702-7, Fungistatic and fungicidal activity of human parotid salivary histidine-rich polypeptides on Candida albicans; and Xu T et al, Infect Immun. August 1991;59(8):2549-54, Anticandidal activity of major human salivary histatins. Furthermore, tissue distribution of RNAs for cystatins, histatins, statherin, and proline-rich salivary proteins in humans and macaques is further discussed in Sabatini et al, J Dent Res July 1989;68(7):113845.

[0701] In further embodiments, the skilled artisan will appreciate that fragments and analogues of PRSG and HSTG may readily be generated and selected. Selection of preferred fragments and analogies may be carried out by assaying for a desired antimicrobial activity. For example, synthetic histatin analogues and methods for obtaining such analogies with broad-spectrum antimicrobial activity are described in Helmerhorst E J et al, Biochem J 1997 Aug. 15;326 (Pt 1):3945, where histatin analogies inhibited the growth of the second most common yeast found in clinical isolates, Torulopsis glabrata, of oral- and non-oral pathogens such as Prevotella intermedia and Streptococcus mutants, and of a methicillin-resistant Staphylococcus aureus.

[0702] Thus, in preferred embodiments, the PRSG and/or HSTG polypeptides or fragments thereof may be used in oral, injectable, topical or edible compositions for the treatment of infection PRSG and/or HSTG polypeptides may also be used as antimicrobiavantifungal compositions for disinfection of surfaces (e.g. in industrial settings).

[0703] In a preferred example further discussed below, the PRSG and/or HSTG polypeptides or fragments thereof are used in oral, topical (e.g. mouthwash) or edible compositions optionally containing additional salivary proteins to provide an anticaries effect. While there is an interest in developing and marketing products which reduce caries without reliance on a high level of fluoride ions (such as in fluoridated water and fluoride toothpastes), there have not been many reports of such approaches meeting with success. While certain cysteine-rich proteins have been proposed useful in the treatment of dental caries (U.S. Pat. No. 5,688,766, Revis et al), the present invention provides PRSG and HSTG polypeptides which may provide higher potency, efficacy and range of disinfection and protection.

[0704] PRSG and HSTG polypeptide compositions can be administered in a formulation comprising a carrier. A preferred carrier composition for the active(s) of this invention are oral compositions. Such compositions include toothpastes, mouthrinses, liquid dentifrices, lozenges, chewing gums or other vehicle suitable for use in the oral cavity. Toothpastes and mouthrinses are the preferred systems. The abrasive polishing material contemplated for use in the toothpaste compositions of the present invention can be any material which does not excessively abrade dentin. These include, for example, silicas including gels and precipitates, calcium carbonate, dicalcium orthophosphate dihydrate, calcium pyrophosphate, tricalcium phosphate, calcium polymetaphosphate, insoluble sodium polymetaphosphate, hydrated alumina, and resinous abrasive materials such as particulate condensation products of urea and formaldehyde, and others such as disclosed by Cooley et al. in U.S. Pat. No. 3,070,510, Dec. 25, 1962, incorporated herein by reference. Mixtures of abrasives may also be used. Silica dental abrasives, of various types, can provide the unique benefits of exceptional dental cleaning and polishing performance without unduly abrading tooth enamel or dentin. For these reasons, they are preferred for use herein. Flavoring agents can also be added to toothpaste compositions. Suitable flavoring agents include oil of wintergreen, oil of peppermint, oil of spearmint, oil of sassafras, and oil of clove. Sweetening agents which can be used include aspartame, acesulfame, saccharin, dextrose, levulose and sodium cyclamate. Flavoring and sweetening agents are generally used in toothpastes at levels of from about 0.005% to about 2% by weight. Toothpaste compositions can also contain emulsifying agents. Suitable emulsifying agents are those which are reasonably stable and foam throughout a wide pH range, including non-soap anionic, nonionic, cationic, zwittefionic and amphoteric organic synthetic surfactants. Water is also present in the toothpastes of this invention. Water employed in the preparation of commercially suitable toothpastes should preferably be deionized and free of organic impurities. In preparing toothpastes, it is necessary to add some thickening material to provide a desirable consistency. Preferred thickening agents are carboxyvinyl polymers, carrageenan, hydroxyethyl cellulose and water soluble salts of cellulose ethers such as sodium carboxymethyl cellulose and sodium carboxymethyl hydroxyethyl cellulose. Natural gums such as gum karaya, xanthan gum, gum arabic, and gum tragacanth can also be used. Colloidal magnesium aluminum silicate or finely divided silica can be used as part of the thickening agent to further improve texture. Thickening agents in ane amount from 0.2% to 5.0% by weight of the total composition can be used. It is also desirable to include some humectant material in a toothpaste to keep it from hardening. Suitable humectants include glycerin, sorbitol, and other edible polyhydric alcohols at a level of from about 15% to about 70%.

[0705] Another preferred embodiment of the present invention is a mouthwash composition. Conventional mouthwash composition components can comprise the carrier for the agents of the present invention. Mouthwashes generally comprise from about 20:1 to about 2:1 of a water/ethyl alcohol solution or be alcohol free and preferably other ingredients such as flavor, sweeteners, humectants and sudsing agents such as those mentioned above for dentifrices. The humectants, such as glycerin and sorbitol give a moist feel to the mouth. Generally, on a weight basis the mouthwashes of the invention comprise 0% to 60% (preferably 5% to 20%) ethyl alcohol, 0% to 20% (preferably 5% to 20%) of a humectant, 0% to 2% (preferably 0.01% to 1.0%) emulsifying agents, 0% to 0.5% (preferably 0.005% to 0.06%) sweetening agent such as saccharin or natural sweeteners such as stevroside 0% to 0.3% (preferably 0.03% to 0.3%) flavoring agent, and the balance water.

[0706] The pH of the present compositions and/or the pH in the mouth can be any pH which is safe for the mouth's hard and soft tissues. Such pH's are generally from about 3 to about 10, preferably from about 4 to about 8. Other acceptable oral carders include gums, lozenges, as well as other forms. Such suitable forms are disclosed in U.S. Pat. No. 4,083,955, Apr. 11, 1978 to Grabenstetter et al. incorporated herein in its entirety by reference. Edible compositions are also suitable for use as the carrier compositions herein. Edible compositions include many types of solid as well as liquid compositions. Such compositions include, for example, soft drinks, citrus drinks, cookies, cakes, breads among many others. Such compositions may contain sugar or another sweetener, water, flour, shortening, other fibers such as wheat, corn, barley, rye, oats, psyllium and mixtures thereof.

HSDG (Hydroxysteroid Dehydrogenase) (Clone ID:495917)

[0707] SEQ ID NOS 54 and 381 and clone FL11:495917_{—}160-22-4-0-D8-F encode the polypeptide of SEQ ID NOS 223 and 498 respectively, a hydroxysteroid dehydrogenase referred to herein as HSDG. As the HSDG polypeptide is implicated in steroid hormone regulation, preferably glucocorticoid metabolism, HSDG may be useful in any applications where steroid hormones levels are to be increased or inhibited. HSDG may be useful in the treatment of disease treatable by steroid hormones. HSDG inhibitors may also be useful in systems for self-sufficient biosynthesis of steroid hormones such as glucocorticoids such as in engineered cells comprising elements of the synthesis pathway. HSDG inhibitors of endogenous HSDG activity may allow the recovery of higher amounts of glucocorticoids and/or other synthesized steroid hormones from these cell systems.

[0708] It will be appreciated that all characteristics and uses of the polynucleotides of SEQ ID NOs: 54 and 381 and polypeptides of SEQ ID NO: 223 and 498, described throughout the present application also pertain to the human cDNA of clone 495917, and the polypeptides encoded thereby.

[0709] The HSDG polypeptides of the invention comprise leucine zipper pattern (Prosite ref. PS00029) at amino acid positions 58-79 as well as a N-myristoylation site at amino acid position 36 (GANAGV) of SEQ ID NO 498. In one example, HSDG polypeptides may be used in the production or therapeutic modulation of glucocorticoids. The skilled artisan will recognize that any suitable HSDG polypeptides or variants or fragments thereof capable of metabolizing glucocorticoids can readily be used.

[0710] In one embodiment HSDG activity can be determined by detecting levels of glucocorticoids or metabolites or glucocorticoids. Moreover, structural aspects of 11beta-hydroxysteroid dehydrogenase have been documented in the art and may serve as a guidelines for developing suitable HSDG variants and fragments. The HSDG polypeptides of the invention may allow modulation of glucocorticoid activity or identification (e.g. drug screening) of compounds capable of specifically modulating glucocorticoid levels or activity. HSDG may be useful in allowing the modulation of steroid hormone synthesis, or glucocorticoid synthesis to be carried in a tissue specific manner, thereby offering improved methods for treating disease with decreased risk of side effects.

[0711] Corticosteroids, also referred to as glucocorticoids are steroid hormones, the most common form of which is cortisol. Modulation of glucocorticoid activity is important in regulating physiological processes in a wide range of tissues and organs. Glucocorticoids act within the gonads to directly suppress testosterone production (Monder, C et al, (1994) Steroids 59, 69-73). High levels of glucocorticoids may also result in excessive salt and water retention by the kidneys, producing high blood pressure.

[0712] Glucocorticoid action is mediated via binding of the molecule to a receptor, defined hereinafter as either a mineralocorticoid receptor (MR) or a glucocorticoid receptor (GR). Krozowski, Z. S. et al, ((1983) Proc. Natl. Acad. Sci. USA 80, 6056-6060) and Beaumont, K. et al, ((1983) Endocrinology 113, 2043-2049) showed that MR of adrenalectomised rats have an equal affinity for the mineralocorticoid aldosterone and glucocorticoids, for example corticosterone and cortisol. Confirmatory evidence has been found for human MR (Arriza, J. L et al, (1988) Neuron I, 887-900). In patients suffering from the congenital syndrome of Apparent Mineralocorticoid Excess (AME), cortisol levels are reportedly elevated and bind to and activate MRs normally occupied by aldosterone, the steroid that regulates salt and water balance in the body. Salt and water are retained in AME patients causing severe hypertension.

[0713] Like HSDG, the enzyme 11β-hydroxysteroid dehydrogenase (11βHSD), also discussed in U.S. Pat. No. 5,965,372 (Funder et al) may be involved in converting glucocorticoids into metabolites that are unable to bind to MRs (Edwards et al, (1988) Lancet. 2: 986-9; Funder et al, (1988) Science 242, 583,585), present in mineralocorticoid target tissues, for example kidney, pancreas, small intestine, colon, as well as the hippocampus, placenta and gonads. For example, in aldosterone target tissues 11βHSD inactivates glucocorticoid molecules, allowing the much lower circulating levels of aldosterone to maintain renal homeostasis. When the 11βHSD enzyme is inactivated, for example in AME patients or following administration of glycyrrhetinic acid, a component of licorice, severe hypertension results. Further, placental 11βHSD activity may protect the foetus from high circulating levels of glucocorticoid which may predispose to hypertension in later life (Edwards et al., 1993). Biochemical characterisation of activity has indicated the presence of at least two 11βHSD isoenzymes (11βHSD1 and 11βHSD2) with different cofactor requirements and substrate affinities. The 11βHSD1 enzyme is a low affinity enzyme that prefers NADP+ as a cofactor (Agarwal et al., 1989). The 11βHSD2 enzyme is a high affinity enzyme (Km for glucocorticoid=10 nM), requiring NAD+, not NADP+ as the preferred cofactor, belonging to a class of glucocorticoid dehydrogenase enzymes hereinafter referred to as “NAD+ dependent glucocorticoid dehydrogenase” enzymes.

[0714] Inverse correlation between 11βHSD enzyme activity in human granulosa-lutein cells and the success of IVF has further been shown, suggesting that activity of this enzyme might be related to the success of embryo attachment and implantation following IVF. The measurement of ovarian 11βHSD enzyme activity as a prognostic indicator for the outcome of assisted conception in all species, is the subject of UK Patent Application No 9305984. However, the disclosure of Michael et al. ((1993) Lancet 342, 711-712), and corresponding UK Patent Application No 9305984 do not identify, or even suggest which isoenzyme in the ovary might be a predictive indicator of IVF embryo transfer, or a means of distinguishing isoenzymes of 11βHSD in the prediction of IVF embryo transfer outcomes. In fact, the enzyme assay procedure might detect all isoenzymes of 11βHSD activity in the cell, some of which may be hitherto uncharacterised.

[0715] Thus, the human HSDG hydroxysteroid dehydrogenase enzyme and the nucleic acids encoding it providing novel means for the development of gene therapies and identification of HSDG activators and inhibitors which alter the endogenous activity of this hydroxysteroid dehydrogenase enzyme in a cell. The present invention also permits the screening, through genetic or immunological means, levels of expression of genes encoding the NAD+ dependent glucocorticoid dehydrogenase enzyme in various tissue or organ types, including for example, skin, colon, kidney, placenta, and gonads, amongst others.

S100G Calcium Binding Protein (Clone ID:200895)

[0716] The polynucleotides of clone FL11:200895_{—}116-055-1-0-H11-F and SEQ ID NOS 132 and 428 encode for the S100 calcium binding protein referred to herein as S100G. SEQ ID NOS 301 and 542 provide the amino acid sequence corresponding to the nucleic acid sequences of SEQ ID NOS 132 and 428, respectively. It will be appreciated that all characteristics and uses of the polynucleotides of SEQ ID NOs: 132 and 428 and polypeptides of SEQ ID NO: 301 and 542, described throughout the present application also pertain to the human cDNA of clone200895, and the polypeptides encoded thereby.

### Background

[0717] In nearly all eukaryotic cells, calcium (Ca²⁺) functions as an intracellular signaling molecule in diverse cellular processes including cell proliferation and differentiation, neurotransmitter secretion, glycogen metabolism, and skeletal muscle contraction. Within a resting cell, the concentration of Ca²⁺ in the cytosol is extremely low, <10⁻⁷ M. However, when the cell is stimulated by an external signal, such as a neural impulse or a growth factor, the cytosolic concentration of Ca²⁺ increases by about 50-fold. This influx of Ca²⁺ is caused by the opening of plasma membrane Ca²⁺ channels and the release of Ca²⁺ from intracellular stores such as the endoplasmic reticulum. Ca²⁺ directly activates regulatory enzymes, such as protein kinase C, which trigger signal transduction pathways.

[0718] The protein of SEQ ID NOS 301 and 542 is a calcium binding S100 protein typically found in heart and muscle. S100 proteins are low-molecular weight calcium binding proteins that are believed to play an important role in various cellular processes such as cytoskeletavmembrane interactions, cell division and differentiation. The expression of S100 proteins has been evaluated in a variety of disorders. For example, S100 protein have been evaluated as markers of inflammatory disease, including ulcerative colitits, Crohn's disease, and as serum markers for subjects with infections diseases including AIDS and malaria and for subjects with hematological disease. Evidence has accumulated that indicates that S100 proteins can alter cellular invasion and metastatic spead of cancer. For example, S100 protein is expressed in dendritic cells in human transitional cell carcinoma of the bladder and the invasive potential of these tumor has been found to correlate with the presence of S100 protein expressing cells.

### Therapeutics and Diagnostics

[0719] The S100G protein of SEQ ID NOS 301 and 542 disclosed herein provides new calcium binding S100 protein compositions useful in the diagnosis, prevention, and treatment of cancer, reproductive disorders, immune disorders, neuronal disorders, vesicle trafficking disorders and developmental disorders.

[0720] CBPs are implicated in a variety of disorders and several CBPs have proven to be effective therapeutic targets for which small molecule inhibitors could be developed. However, while several CBPs are targets for widely-used therapeutic treatments, it would be advantageous to provide further CBPs allowing more selective therapeutic treatments for disease to be developed. In one example, calcineurin is found in the cells of all eukaryotes ranging from yeast to mammals. Calcineurin is a target for inhibition by the immunosuppressive agents cyclosporin A and FK506 emphasizing its importance in immune disorders (Kissinger, C. R. et al. (1995) Nature 378:641-644). Calcineurin also plays a critical role in transcriptional regulation and growth control in T-lymphocytes (Wang, M. G. et al. (1996) Cytogenet. Cell Genet. 72:236-241). However, inhibition of calcineurin phosphatase activity has been implicated both in the mechanism of immunosuppression and in the observed toxic side effects of FKS06 in nonlymphoid cells, suggesting that identification of a new (FK binding proteins (FKBPs) that can mediate calcineurin inhibition and are restricted in its expression to T cells could provide new immunosuppressive drugs may be identified that, by virtue of their specific interaction with the FKBP, would be targeted in their site of action (Baughman G, et al Mol Cell Biol August 1995;15(8):4395402). In another CBP example, levels of CaM are increased several-fold in tumors and tumor-derived cell lines for various types of cancer (Rasmussen, C. D. and Means, A. R. (1989) Trends in Neuroscience 12:433438). Calcium binding S100β is another example of a CBP involved in a variety of disorders. Like the S100G protein of the invention, S100β contains an EF-hand motif. S100β is abundantly expressed in the nervous system. S100β levels are increased in the blood and cerebrospinal fluid of patients with neurological injury resulting from cerebral infarction, transient ischemic attacks, hemorrhagia, head trauma, and Down's syndrome. Furthermore, S100β and other neural-specific CBPs may also protect against neurodegenerative disorders, such as Alzheimer's, Parkinson's, and Huntington's diseases. S100β is produced and secreted by glial cells in the central and peripheral nervous systems (Allore, R. J. et al. (1990) J. Biol. Chem. 265:15537-15543). The accumulation of S100β in mature glial cells is associated with the microtubule network. S100β promotes neuronal differentiation and survival but may be detrimental to cells if overexpressed. The selective overproduction has been implicated in the progression of the neuropathological changes in Alzheimer's disease which may involve mitotic protein kinases (Marshak, D. R. and Pena, L. A. (1992) Prog. Clin. Biol. Res. 379:289-307). Adult T-cell leukaemia (ATL) is a mature T-cell malignancy which is caused by human T lymphotrophic virus type-I. Diminished surface expression of the T-cell receptor alpha beta (TCRαβ+) complex is a specific feature of ATL cells. S100β is not detectable in CD4+, TCRαβ+ ATL cells, but is expressed in CD4-, CD8-, TCRαβ+ leukaemic cells from four ATL patients. This suggested that increased levels of S100β may be associated with the diminished surface expression of the TCRαβ+ complex in ATL (Suzushima, H. et al. (1994) Leuk. Lymphoma 13:257-262). Elevated serum levels of S100β are associated with disseminated malignant melanoma metastases, suggesting that serum S100β may be of value as a clinical marker for progression of metastatic melanoma (Henze, G. et al. (1997) Dermatology 194:208-212). In yet another example, messenger RNA levels encoding human calgizzarin (an S100-like protein), as well as those encoding phospholipase A₂, are elevated in colorectal cancers compared with those of normal colorectal mucosa (Tanaka, M. et al. (1995) Cancer Lett. 89:195-200). Finally, an intracellular S100 calcium-binding protein has been isolated from rat peritoneum. This protein, MRP14, is one of two migration inhibitory factor-related proteins that are expressed in peritoneal macrophages in the arthritis-susceptible Lewis/N rat (Imamichi, T. et al. (1993) Biochem. Biophys. Res. Comm. 194:819-825).

[0721] However, despite the many uses and therapeutics based on S100 proteins and other-CBPs, it would be advantageous to selectively target CBPs which are involved in a disorder and which are found specifically in the targeted cells or tissues. Thus, in a first embodiment, the S100G protein of the invention can be used for the development of selective inhibitors of calcium signaling, eg. preferably inhibitors of transcriptional regulation and cell growth control.

[0722] In one embodiment, an antagonist of S100G may be administered to a subject to prevent or treat a neuronal disorder. Such disorders may include, but are not limited to, akathesia, Alzheimer's disease, amnesia, amyotrophic lateral sclerosis, bipolar disorder, catatonia, cerebral neoplasms, dementia, depression, Down's syndrome, tardive dyskinesia, dystonias, epilepsy, Huntington's disease, multiple sclerosis, neurofibromatosis, Parkinson's disease, paranoid psychoses, schizophrenia, and Tourette's disorder. In one aspect, an antibody which specifically binds S100G may be used directly as an antagonist or indirectly as a targeting or delivery mechanism for bringing a pharmaceutical agent to cells or tissue which express S100G.

[0723] In one embodiment, an antagonist of S100G may be administered to a subject to prevent or treat a vesicle trafficking disorder. Such disorders may include, but are not limited to, cystic fibrosis, glucose-galactose malabsorption syndrome, hypercholesterolemia, diabetes mellitus, diabetes insipidus, hyper- and hypoglycemia, Grave's disease, goiter, Cushing's disease, and Addison's disease; gastrointestinal disorders including ulcerative colitis, gastric and duodenal ulcers; other conditions associated with abnormal vesicle trafficking including AIDS; allergies including hay fever, asthma, and urticaria (hives); autoimmune hemolytic anemia; proliferative glomerulonephritis; inflammatory bowel disease; multiple sclerosis; myasthenia gravis; rheumatoid and osteoarthritis; scleroderma; Chediak-Higashi and Sjogren's syndromes; systemic lupus erythematosus; toxic shock syndrome; traumatic tissue damage; and viral, bacterial, fungal, helminth, and protozoal infections. In one aspect, an antibody which specifically binds S100G may be used directly as an antagonist or indirectly as a targeting or delivery mechanism for bringing a pharmaceutical agent to cells or tissue which express S100G.

[0724] In one embodiment, an antagonist of S100G may be administered to a subject to prevent or treat an immunological disorder. Such disorders may include, but are not limited to, AIDS, Addison's disease, adult respiratory distress syndrome, allergies, anemia, asthma, atherosclerosis, bronchitis, cholecystitis, Crohn's disease, ulcerative colitis, atopic dermatitis, dermatomyositis, diabetes mellitus, emphysema, erythema nodosum, atrophic gastritis, glomerulonephritis, gout, Graves' disease, hypereosinophilia, irritable bowel syndrome, lupus erythematosus, multiple sclerosis, myasthenia gravis, myocardial or pericardial inflammation, osteoarthritis, osteoporosis, pancreatitis, polymyositis, rheumatoid arthritis, scleroderma, Sjogren's syndrome, Werner syndrome, and autoimmune thyroiditis; complications of cancer, hemodialysis, and extracorporeal circulation; viral, bacterial, fungal, parasitic, protozoal, and helminthic infections; and trauma. In one aspect, an antibody which specifically binds S100P may be used directly as an antagonist or indirectly as a targeting or delivery mechanism for bringing a pharmaceutical agent to cells or tissue which express S100G.

[0725] In one embodiment, an antagonist of S100G may be administered to a subject to prevent or treat a neoplastic disorder. Such disorders may include, but are not limited to, adenocarcinoma, leukemia, lymphoma, melanoma, myeloma, sarcoma, teratocarcinoma, and, in particular, cancers of the adrenal gland, bladder, bone, bone marrow, brain, breast, cervix, gall bladder, ganglia, gastrointestinal tract, heart, kidney, liver, lung, muscle, ovary, pancreas, parathyroid, penis, prostate, salivary glands, skin, spleen, testis, thymus, thyroid, and uterus. In one aspect, an antibody which specifically binds S100P may be used directly as an antagonist or indirectly as a targeting or delivery mechanism for bringing a pharmaceutical agent to cells or tissue which express S100G.

[0726] In addition, the S100G nucleic acids and polypeptides of the present invention can be used to identify compounds for the treatment of a subject experiencing negative side effects from the administration of other pharmaceuticals, such as those drugs that disrupt the body's calcium homeostasis. Co-administration of said compounds would be useful to counter-effect iatrogenically caused dysfunction of calcium metabolism.

[0727] An antagonist of S100G may be produced using methods which are generally known in the art. In particular, purified S100G may be used to produce antibodies or to screen libraries of pharmaceutical agents to identify those which specifically bind S100G. In one example, a positive screening for drugs that specifically inhibit the Ca2+-signaling activity was carried out on the basis of the growth promoting effect on a yeast mutant with a peculiar phenotype (Shitamukai A et al, Biosci Biotechnol Biochem September 2000;64(9):1942-6). An inappropriate activation of a signaling pathway in yeast often has a deleterious physiological effect and causes various defects, including growth defects. In a certain genetic background (deltazds1) of Saccharomyces cerevisiae, the cell-cycle progression in G2 is specifically blocked in the medium with CaCl2 by the hyperactivation of the Ca2+-signaling pathways. Shitamukai et al provide an example of a drug screening procedure designed to detect the active compounds that specifically attenuate the Ca2+-signaling activity on the basis of the ability to abrogate the growth defect of the cells suffering from the hyperactivated Ca2+signal. Screening conditions were established for the drugs that suppress the Ca2+-induced growth inhibition using known calcineurin inhibitors as model compounds, and an indicator strain with an increased drug sensitivity was constructed with a syr1/erg3 null mutation.

[0728] In another embodiment, a vector expressing the complement of the polynucleotide encoding S100P may be administered to a subject to treat or prevent a neuronal disorder, immunological disorder, neoplastic disorder or vesicle trafficking disorder including, but not limited to, those described above. In other embodiments, any of the proteins, antagonists, antibodies, agonists, complementary sequences or vectors of the invention may be administered in combination with other appropriate therapeutic agents. Selection of the appropriate agents for use in combination therapy may be made by one of ordinary skill in the art, according to conventional pharmaceutical principles. The combination of therapeutic agents may act synergistically to effect the treatment or prevention of the various disorders described above. Using this approach, one may be able to achieve therapeutic efficacy with lower dosages of each agent, thus reducing the potential for adverse side effects.

[0729] Expression of S100 proteins have been evaluated as serum markers for melanoma (Henze et al, Dermatology 194:208-212; Buer et al, 1997 Brit. J. Cancer 75: 1373-1376; Sherbert et al. 1998; Anticancer Res. 18:2415-2422) and more recently as serum markers for cancer in general (particularly breast, colon and lung cancers) and that their detectability in serum can have prognostic and/or therapeutic significance in cancer. Furthermore auto-antibodies to S100 proteins were found in cancer patients. (International Patent Publication No. WO 00/26668). The S100G protein of the invention may thus be used in the diagnosis and prevention of cancer, for identification of subjects predisposed to cancer, for monitoring patients undergoing treatment for cancer based on the increased level of S100G protein(s) in biological fluid samples of subjects.

[0730] Methods for diagnosis and prognosis of cancer in a subject may comprise

[0731] a) detecting a S100G protein in a biological fluid sample obtained from a subject, and

[0732] b) comparing the level of protein detected in the subject's sample to the level of protein detected in a control sample,

[0733] wherein an increase in the level of S100G protein detected in the subject's sample as compared to control samples is an indicator of a subject with cancer of at increased risk for cancer.

[0734] The invention also comprises methods for diagnosis and prognosis of a subject with cancer comprising:

[0735] a) contacting a serum sample derived from a subject with a sample containing S100G protein antigens under conditions such that a specific antigen-antibody complex binding can occur; and

[0736] b) detecting the presence of immunospecific binding of autoantibodies present in the suject's serum samples to the S100G protein;

[0737] wherein the presence of immunospecific binding of autoantibodies indicates the presence of cancer.

[0738] Assays for detection of S100G protein in a sample can be accomplished by any suitable method, including immunoassays where in S100G proteins are detected by their interaction with an S100G specific antibody. In addition, reagents other than antibodies such as for example polypeptides that specifically bind S100G may be used.

[0739] In yet further embodiments, the S100G protein of the invention may be useful for the development of specific anti-S100 antibodies which are specific for S100 proteins other than S100G. As several S100 proteins have been implicated in disease, it may be advantageous to develop a panel of S 100 specific antibodies to characterize disease, eg. cancers. Thus, S100G proteins and antibodies thereto may be advantageous to distinguish cancer types. S100G proteins and antibodies may also be useful in the screening of S100 specific antibodies by determining the selectivity of a given anti-S100 antibody for its target, and eliminating antibodies which are cross-reactive with S100G proteins.

### Stuctural Aspects of S100 Proteins of the Invention

[0740] The S100 proteins are a group of low molecular mass (approximately 10-12 kDa) acidic Ca²⁺-binding proteins, so named after the solubility of the first isolated protein in 100% saturated ammonium sulfate. The most striking conserved feature of these proteins is the presence of an EF-hand. The S100 proteins have two Ca²⁺-binding domains. One of these domains is a basic helix-loop-helix domain, the other domain is an acidic helix-loop-helix EF-hand (Kligman, D. and Hilt, D. C. (1 988) Trends Biochem. Sci. 13:437442). The EF-hand domain also encompasses a part of a region within S100 proteins which specifically identifies members of the S100 family of proteins which have a low affinity for Ca²⁺ ions (S100/ICaBP; PROSITE PS00303, SWISSPROT, PFAM PF01023). The EF-hand is characterized by a twelve amino acid residue-containing loop, flanked by two alpha-helices, orientated approximately 90 degrees with respect to one another. Aspartate (D) and glutamate (E) residues are usually found bordering the twelve amino acid loop. In addition, a conserved glycine residue in the central portion of the loop is found in most Ca²⁺-binding EF-hand domains. Oxygen ligands within this domain coordinate the Ca²⁺ ion (Kretsinger, R. H. and Nockolds, C. E. (1973) J. Biol. Chem. 248:3313-3326). It will also be appreciated by the skilled artisan that modifications of the S100G polypeptide may readily be made based on extensive knowledge of CBP stucture and Ca(2+) binding mechanisms, such as Sastry M et al, (Structure 1998;6:223-23 1), describing the three-dimensional structure of Ca(2+)bound calcyclin and its implications for Ca(2+}signal transduction by S100.

[0741] Recently, a protein designated S100A 13 has been discovered and characterized which shared significant primary structure similarity with the S100G polypeptide of the invention. (Wicki et al, (1996) BBRC 227:594-599).

[0742] The binding to calcium induces a conformational change in the S100 proteins, and this may then affect the secondary effector proteins. This mode of protein-protein interaction and modulation of the activity of the secondary effector protein is similar to that seen with calmodulin, also containing the EF-hands. The S100G protein of the invention comprises an ICaBP type calcium binding domain domain at amino acid positions 9 to 52 and casein kinase II phosphorylation site patterns at amino acid position 7 (TELE); 34 (SVNE); and 55 (SLDE) of SEQ ID NO 542.

[0743] The S100G polypeptides of the invention may thus also be used in any situation in vivo or in vitro where it is desired to modulate, preferably decrease the level of free calcium, or in applications involving sensing a change in calcium concentration. In one aspect, S100G nucleic acids and polypeptides may be used to develop a calcium biosensor. Calcium biosensors may have particular utility in detecting abnormalities in calcium transport that result in uncompensated influx into, or efflux from, the extracellular fluid, will result in hypercalcaemia or hypocalcaemia, respectively. Such abnormalities in serum calcium concentration may have profound effects on neurological, gastrointestinal, and renal function (Bushinsky DA et al, Lancet 1998 Jul. 25;352 (9124):306-1 1). Calcium biosensors may be developed by using any suitable means known in the art to detect a conformational change induced by the binding of calcium to the EF-hand domains of the S100G polypeptides. Preferably, the conformational change is detected by detecting a change in the ability of the S100G protein to bind a selected secondary effector protein

[0744] As the distribution of particular S100 proteins is dependent on specific cell types, the S100 proteins may be involved in transducing the signal of an increase in intracellular calcium in a cell type-specific fashion (Wu, T. et al. (1997) J. Biol. Chem. 272:17145-17153).

CaMLP (Calcium Binding Protein) (Clone ID:500742698)

[0745] Calcium is one of the “second messengers” which relays chemical and electrical signals within a cell. This signal transduction and, hence the regulation of biological processes, involves interaction of calcium ion with high-affinity calcium-binding proteins (CBPs). Disclosed herein in SEQ ID NOS 184 and 469 is one such protein, encoded by the nucleic acid sequences of SEQ ID NOS 15 and 352, respectively, and the clone FLI 1:500742698_{—}204-614-0-B2-F, and further referred to herein as CAMLP, which is thought to act as a Ca²⁺ sensing and binding protein involved in diverse aspects of cell proliferation (such as for example of hepatocytes, melanoma cells, leukemic lymphocytes, and HUVEC (human umbilical vein endothelial cells)) and differentiation. It will be appreciated that all characteristics and uses of the polynucleotides of SEQ ID NOs:15 and 352 and polypeptides of SEQ ID NO:184 and 469, described throughout the present application also pertain to the human cDNA of clone 500742698, and the polypeptides encoded thereby. Notably, the CaMLP polypeptide contains EF hand calcium-binding domains (PROSITE PS00018) at amino acid positions 81-93 and at position 129-141 of SEQ ID NO 469. CaMLP

[0746] The cellular processes in which Ca²⁺ functions as an intracellular signaling molecule are diverse, including cell proliferation and differentiation, neurotransmitter secretion, glycogen metabolism, and skeletal muscle contraction. Within a resting cell, the concentration of Ca²⁺ in the cytosol is extremely low, <10.sup.-7 M. However, when the cell is stimulated by an external signal, such as a neural impulse or a growth factor, the cytosolic concentration of Ca²⁺ increases by about 50-fold. This influx of Ca²⁺ is caused by the opening of plasma membrane Ca²⁺ channels and the release of Ca²⁺ from intracellular stores such as the endoplasmic reticulum. Ca²⁺ directly activates regulatory enzymes, such as protein kinase C, which trigger signal transduction pathways. Ca²⁺ also binds to specific Ca²⁺-binding proteins (CBPs) such as calbindins, troponin C, calmodulin, and S-100 proteins which then activate multiple target proteins including enzymes, membrane transport pumps, and ion channels. Calmodulin (CaM) is the most widely distributed and the most common mediator of calcium effects and appears to be the primary sensor of Ca²⁺ changes in eukaryotic cells. The binding of Ca²⁺ to CaM induces marked conformational changes in the protein permitting interaction with, and regulation of over 100 different proteins. CBP interactions are involved in a multitude of cellular processes including, but not limited to, gene regulation, DNA 30 synthesis, cell cycle progression, mitosis, cytokinesis, cytoskeletal organization, muscle contraction, signal transduction, ion homeostasis, exocytosis, and metabolic regulation (Celio, M. R. et al. (1996) Guidebook to Calcium-binding Proteins, Oxford University Press, Oxford, UK, pp. 15-20).

### Therapeutics

[0747] The CaMLP protein of SEQ ID NOS 184 and 469 disclosed herein provides new calcium binding protein compositions useful in the diagnosis, prevention, and treatment of cancer, reproductive disorders, immune disorders, neuronal disorders and developmental disorders.

[0748] Calcium binding proteins (CBPs) are implicated in a variety of disorders and several CBPs have proven to be effective therapeutic targets for which small molecule inhibitors could be developed. However, while several CBPs are targets for widely-used therapeutic treatments, it would be advantageous to provide further CBPs allowing more selective therapeutic treatments for disease to be developed. Evidence has accumulated for a large number of CBPs suggesting involvement in cell proliferative disorders. It is proposed that CaMLP may be useful as a tissue specific calmodulin homologue allowing the development of specific inhibitors and activators having increased selectivity and safety (decreased side effect profile). To date, calmodulin antagonists are reportedly useful for the treatment of some malignant tumors, particularly those of the central nervous system, as well as lung tumors. The antitumor activity of calmodulin antagonists, as well as successful chemotherapy using the same, has been described, for example, in Sculler et al. Cancer Res., 50:1645-1649 (1990) and Hait et al. Cancer Res., 50:6636-6640 (1990). U.S. Pat. No. 5,340,565, additionally describes the use of calmodulin antagonists or inhibitors as agents which enhance the effectiveness of a chemotherapeutic agent or radiation treatment. Specifically, described therein is a method of inhibiting or killing a tumor or cancer cell in a human patient undergoing radiation therapy or chemotherapy, for example with such chemotherapeutic agents as cisplatin (Platinol®), by additionally administering a calmodulin binding agent which inhibits calmodulin activity.

[0749] Calmodulin is also believed to play a pathogenic role in the tissue damage caused by burns and frostbite (Beitner et al., Gen. Pharmac. 20: 641-646, 1989), as well as in dermatitis and other conditions involving keratinocyte hyperproliferation. The methods of the present invention may be applied to the treatment of these and other conditions wherein antagonism of calmodulin activity is desirable.

[0750] Thus, as discussed above, CaMLP protein of the invention shares structural similarity with the ubiquitous intracellular receptor protein calmodulin suggesting that CaMLP may be useful in the development of selective CaMLP inhibitors. The nucleic acids and polypeptides of the invention thus provide a novel therapeutic target in particular for cell proliferative disorders. In one aspect, said nucleic acids and protein may be used in drug screening processes to develop selective calmodulin and other calcium binding protein antagonists which do not inhibit the polypeptide of the invention. In another aspect, the nucleic acids and polypeptides of the invention may be used in drug screening processes to identify selective modulators of the CaMLP without inhibiting calmodulin, thereby identifying compounds less likely to cause unwanted side effects. In yet another aspect, the nucleic acids and polypeptides of the invention may be used in drug screening processes to identify selective modulators of both calmodulin and CaMLP, thereby identifying compounds having increased potency.

[0751] Upon calcium binding, CaMLP may interact with a number of protein targets in a calcium dependent manner, thereby altering a number of complex biochemical pathways that can affect the overall behavior of cells. The calcium-calmodulin complex for example controls the biological activity of more than thirty different proteins including several enzymes, ion transporters, receptors, motor proteins, transcription factors, and cytoskeletal components in eukaryotic cells.

[0752] As described in U.S. Pat. No. 5,840,697, Blondelle et al have peptide inhibitors of calmodulin. A number of other calmodulin targeted compounds are known and used for a variety of therapeutic applications. For instance, chlorpromazine (Thorazine.RTM.) and related phenothiazine derivatives, disclosed, for example, in U.S. Pat. No. 2,645,640, are calmodulin antagonists useful as tranquilizers and sedatives. Naphthalenen-sulfonamides, also calmodulin antagonists, are known to inhibit cell proliferation, as disclosed, for example, in Hidaka et al. ((1981), PNAS, 78:43544357) and are useful as antitumor agents. In addition, the cyclic peptide cyclosporin A (Sandimmune®), disclosed in U.S. Pat. No. 4,117,118, is as an immunosuppressive agent which is thought to work by inhibiting calmodulin mediated responses in lymphoid cells.

[0753] Many existing calmodulin inhibitors have undesirable biological effects when administered at concentrations sufficient to block calmodulin. These undesirable biological effects include non-specific binding to other proteins or receptors, as described, for example, in Polak et al, ((1991), J. Neurosci. 11:534-542.) In addition, negative side effects such as toxicity can occur. A specific example is the toxic side effects from cyclosporin A. Therefore, a need exists for calmodulin targeted agents, and in particular calmodulin antagonists which inhibit calmodulin without having additional, undesirable biological or side effects. In particular there is a need for inhibitors which are specific to calmodulin and which do not have toxic side effects.

[0754] In addition, the CaMLP nucleic acids and polypeptides of the present invention can be used to identify compounds for the treatment of a subject experiencing negative side effects from the administration of other pharmaceuticals, such as those drugs that disrupt the body's calcium homeostasis. Co-administration of said compounds would be useful to counter-effect iatrogenically caused dysfunction of calcium metabolism. Such disorders include, but are not limited to, organ damage, autoimmune disorders, psychotic disorders, tumors and drug induced dysfunction, such as negative side effects subsequent to administration of pharmaceuticals. For example, organ or tissue transplantation can result in autoimmune disorders, such as tissue graft (allograft) rejections.

[0755] It is well known that calmodulin-targeted compounds which are antagonists can be used as immunosuppressive agents. In addition, also as described above, such compounds are widely used as sedative or anti-psychotic agents. Furthermore, there is evidence that calmodulin (and hence CaMLP) antagonists are useful for the treatment of some malignant tumors, particularly those of the central nervous system, as well as lung tumors. The antitumor activity of calmodulin antagonists, as well as successful chemotherapy using the same, has been described, for example, in Sculler et al. Cancer Res., 50:1645-1649 (1990) and Hait et al. Cancer Res., 50:6636-6640 (1990), both of which are incorporated herein by reference. U.S. Pat. No. 5,340,565, which is incorporated herein by reference, additionally describes the use of calmodulin antagonists or inhibitors as agents which enhance the effectiveness of a chemotherapeutic agent or radiation treatment. Specifically, described therein is a method of inhibiting or killing a tumor or cancer cell in a human patient undergoing radiation therapy or chemotherapy, for example with such chemotherapeutic agents as cisplatin (Platinol), by additionally administering a calmodulin binding agent which inhibits calmodulin activity.

[0756] It has also been found that extracellular calmodulin inhibits TNF release and facilitates elastase release, providing further suggestion that CaMLP, CaMLP analogues and CaMLP receptor agonists are useful agents for regulating the inflammatory process. CaMLP antagonists, which include CaMLP receptor antagonists and CaMLP -binding molecules, may be used to block the interaction of CaMLP with a receptor, thus providing the opposite effect from CaMLP, its analogues and receptor agonists. CaMLP may serve as a potent modulator of self-directed inflammation by assisting in the recognition of self vs. non-self as prokaryotes (e.g., bacterial pathogens) do not contain CaMLP. In some situations such as in tumor necrosis, release of extracellular CaMLP may lead to an inappropriate host response and failure of the immune/inflammatory systems to eradicate tumor cells. Further, a diagnostic test has been developed which can discern patient variabilities in TNF inhibition by calmodulin and other substances. This test can be utilized in monitoring individual patients for determining effective therapies, and for predicting efficacy of therapy with extracellular CAMLP, CaMLP analogues or CaMLP receptor agonists on the one hand and CaMLP antagonists on the other. A diagnostic test for elastase has also been developed with similar utility.

Lysozyme C Protein of SEQ ID NO: 196 (Internal Designation 482181) and Related Protein of SEQ ID NO:479

[0757] The polypeptides of SEQ ID NO: 196 and SEQ ID NO:479encoded by the cDNA of SEQ ID NO:27 and 362, respectively, belong to the widely conserved family of lysozyme C precursors (Prager and Jollés, Lysozymes: model enzymes in biochemistry and biology, ed. Jolles, 9-321 (1996), Qasba and Kumar, Crit. Rev. Biochem. Mol. Biol. 32:255-306 (1997)), which disclosures are hereby incorporated by reference in their entireties. The protein of SEQ ID NOs: 196 and 479 or part thereof plays a role in glycoprotein and/or peptidoglycan metabolism, probably as a glycosyl hydrolase of family 22. Thus, the protein of the invention or part thereof is involved in immune and inflammatory responses and has antiviral, antibacterial, anti-inflammatory and/or anti-histaminic functions. Preferred polypeptides of the invention are polypeptides comprising the amino acids of SEQ ID NO:196 from positions 19 to 100, or from positions 1 to 100. Other preferred polypeptides of the invention are fragments of SEQ ID NO: 196 having any of the biological activities described herein. The glycolytic activity of the protein of the invention or part thereof may be assayed using any of the assays known to those skilled in the art including those described in Gold and Schweiger, M. Methods in Enzymology, Vol. XX, Part C pp. 537-542, Ed. Moldave, Academic Press,New York and London, 1971 and in the U.S. Pat. No. 4,255,517, which disclosures are hereby incorporated by reference in their entireties.

[0758] Lysozymes, which are ubiquitous proteins found in most body secretions, are defined as 1,4-beta-N-acetylmuramidase which cleave the glycoside bond between the C-1 of N-acetyl-muramic acid and the C-4 of N-acetylglucosamine in the peptidoglycan of bacteria. They have various therapeutic properties, such as antiviral, antibacterial, anti-inflammatory and antihistaminic effects. The activity of lysozymes as an anti-bacterial agent appears to be based on both its direct bacteriolytic activity and also on stimulatory effects in connection with phagocytosis of polymorphonuclear leucocytes and macrophages (Biggar and Sturgess, J. M. Infect Immunol. 16: 974-982 (1977); Thacore and Willet, Am. Rev. Resp. Dis. 93: 786-790 (1966); Klockars and Roberts, P. Acta Haematol 55: 289-292 (1976)), which disclosures are hereby incorporated by reference in their entireties. Lysozymes have proven to be not only a selective factor but also an effective factor against microorganisms of the mouth (Iacono et al, J. J. Infect. Immunol. 29: 623-632 (1980)), which disclosure is hereby incorporated by reference in its entirety. Lysozymes can also kill pathogens by acting synergistically with other proteins such as complement or antibody to lyse pathogenic cells. Lysozymes, also inhibit chemotaxis of polymorphonuclear leukocytes and limit the production of oxygen free radicals following an infection. This limits the degree of inflammation, while at the same time enhances phagocytosis by these cells. Other postulated functions of lysozymes include immune stimulation (Jolles, P. Biomedicine 25: 275-276 (1976) Ossermann, E. F. Adv. Pathobiol 4: 98-102 (1976)) and immunological and non-immunological monitoring of host membranes for any neoplastic transformation (Jolles, P. Biomedicine 25: 275-276 (1976); Ossermann, E. F. Adv. Pathobiol 4: 98-102 (1976)), which disclosures are hereby incorporated by reference in their entireties. Lysozymes may thus be used in a wide spectrum of applications (see U.S. Pat. No. 5,618,712, which disclosure is hereby incorporated by reference in its entirety). Determination of the lysozymes from serum and/or urine is used to diagnose various diseases or as an indicator for their development. In acute lymphoblastic leukaemia the lysozyme serum level is significantly reduced, whereas in chronic myelotic leukaemia and in acute monoblastic and myelomonocytic leukaemia the lysozyme concentration in the serum is greatly increased. The therapeutically effective use of lysozyme is possible in the treatment of various bacterial and virus infections (Zona, Herpes zoster), in colitis, various types of pain, in allergies, inflammation and in pediatrics (the conversion of cows milk into a form suitable for infants by the addition of lysozyme).

[0759] The invention relates to methods and compositions using the protein of the invention or part thereof to hydrolyze one or several substrates, alone or in combination with other substances, preferably antiviral, antifungal and/or antibacterial substances including but not limited to immunoglobulins, lactoferrin, betalysin, fibronectin, and complement components. Such substrates are glycosylated compounds, preferably containing beta-1-4-glycoside bonds, more preferably containing beta-1-4-glycoside bonds between n-acetylomuraminic acid and n-acetyloglucosamine. For example, the protein of the invention or part thereof is added to a sample containing the substrate(s) in conditions allowing hydrolysis, and allowed to catalyze the hydrolysis of the substrate(s). In a preferred embodiment, the hydrolysis is carried out using a standard assay such as those described by Gold and Schweiger, supra, and U.S. Pat. Nos. 5,871,477 and 4,255,517, which disclosures are hereby incorporated by reference in their entireties. In a preferred embodiment, the protein of the invention or part thereof may be used to lyze recombinant bacteria in order to recover the recombinant DNA, the recombinant protein of interest, or both using, for example, any of the assays described in Sambrook, et al., Molecular Cloning: A Laboratory Manual, Second Edition, Cold Spring Harbor Laboratory Press (1989), which disclosure is hereby incorporated by reference in its entirety.

[0760] In an embodiment, the protein of the invention or part thereof is used to hydrolyze contaminating substrates, preferably exogenous substrates from bacterial, fungal or viral origins, in an aqueous sample or onto a material, preferably glassware and plasticware. In particular, the protein of the invention or part thereof may be used as a disinfectant in dental rinse, in protection of aqueous systems or in preparing material for medical applications using any of the methods and compositions described in U.S. Pat. Nos. 5,069,717, 4,355,022 and 5,001,062, which disclosures are hereby incorporated by reference in their entireties. In a preferred embodiment, the protein of the invention is used as a host resistance factor in infants' formulas to convert cow's milk into a form more suitable for infants as described in U.S. Pat. No. 6,020,015, which disclosure is hereby incorporated by reference in its entirety. In another preferred embodiment, the protein of the invention or part thereof may be used as a food preservative (see Hayashi et al., Agric. Biol. Chem. (European Edition of Japanese Journal of Agriculture, Biochemistry and Chemistry), Vol. 53, pp. 3173-3177, 1989), which disclosure is hereby incorporated by reference in its entirety. In addition, the protein of the invention or part thereof may be used to clarify xanthan gum fermented broth for applications in food and in cosmetic industries using the method described in U.S. Pat. No. 5,994,107, which disclosure is hereby incorporated by reference in its entirety. In another preferred embodiment, compositions comprising the protein of the present invention or part thereof are added to samples or materials as a “cocktail” with other antimicrobial substances, preferably antibiotics or hydrolytic enzymes such as those described in U.S. Pat. Nos. 5,458,876 and 5,041,326, which disclosures are hereby incorporated by reference in their entireties, to decontaminate the samples. For example, the protein of the invention or part thereof may be used in place or in combination with antibiotics in cell cultures. The advantage of using a cocktail of hydrolytic enzymes is that one is able to hydrolyze a wide range of substrates without knowing the specificity of any of the enzymes. Using a cocktail of hydrolytic enzymes also protects a sample or material from a wide range of future unknown contaminants from a vast number of sources. For example, the protein of the invention or part thereof is added to samples where contaminating substrates, preferably exogenous substrates from bacterial, fungal or viral origins, is undesirable in an amount sufficient to promote hydrolysis of said substrates. Alternatively, the protein of the invention or part thereof may be bound to a chromatographic support, either alone or in combination with other hydrolytic enzymes, using techniques well known in the art, to form an affinity chromatography column. A sample containing the undesirable substrate is run through the column to remove the substrate. Immobilizing the protein of the invention or part thereof on a support advantageous is particularly for those embodiments in which the method is to be practiced on a commercial scale. This immobilization facilitates the removal of the enzyme from the batch of product and subsequent reuse of the enzyme. Immobilization of the protein of the invention or part thereof can be accomplished, for example, by inserting a cellulose-binding domain in the protein. One of skill in the art will understand that other methods of immobilization could also be used and are described in the available literature. Alternatively, the same methods may be used to identify new substrates.

[0761] In addition, the protein of the invention or part thereof may be useful to identify or quantify the amount of a given substrate in biological fluids, foods, water, air, solutions and the like. In a preferred embodiment, the protein of the invention or part thereof is used in assays and diagnostic kits for the identification and quantification of exogenous substrates in bodily fluids including blood, lymph, saliva or other tissue samples, in addition to bacterial, fungal, plant, yeast, viral or mammalian cell cultures. In a preferred embodiment, the protein of the invention or part thereof is used to detect, identify, and or quantify eubacteria using reagents and assays described in U.S. Pat. No. 5,935,804, which disclosure is hereby incorporated by reference in its entirety. Briefly, the protein of the invention of part thereof is catalytically inactived, i.e. capable of binding but not cleaving a peptidoglycan comprising NAc-muramic acid in the eubacteria, using any of the methods known to those skilled in the art including those which produce a mutant enzyme, a recombinant-enzyme, or a chemically inactivated enzyme. The catalytically inactive protein of the invention is then incubated with an aliquot of a biological sample under conditions suitable for binding of the inactive enzyme to the peptidoglycan substrate. Then, the bound enzyme is detected to assess the presence or amount of the eubacteria in the biological sample.

[0762] In another embodiment, the nucleic acid of the invention or part thereof may be used to increase disease resistance of plants to bacterial, fungal and/or viral infections. A polynucleotide containing the nucleic acid of the invention or part thereof is introduced into the plant genome in conditions allowing correct expression of the transgenic protein using any methods known to those skilled in the art including those disclosed in U.S. Pat. Nos. 5,349,122 and 5,850,025, which disclosures are hereby incorporated by reference in their entireties.

[0763] In another preferred embodiment, the protein of the invention or part thereof may be useful to treat and/or prevent bacterial, fungal and viral infections in humans or in animals caused by various agents including but not limited to Streptococcus, Veillonella alcalescens, Actinomyces, Herpes simplex, Candida albicans, Micrococcus lysodeikticus and HIV by hydrolyzing the glycosylated compounds contained in such micro-organisms. In still a preferred embodiment, the protein of the invention or part thereof is used to prevent and/or treat bacterial, fungal and viral infections in immunocompromised individuals who lack fully functional immune systems, such as neonates or geriatric patients or HIV-infected individuals, or who suffer from a disease affecting the respiratory tract such as cystic fibrosis or the gastrointestinal tract such as ulcerative colitis or sprue.

[0764] In still another embodiment, the protein of the invention or part thereof may be used as a growth factor for in vitro cell culture, preferably for T cells and T cell lines, using techniques and methods taught in U.S. Pat. No. 5,468,635, which disclosure is hereby incorporated by reference in its entirety.

[0765] In addition, the protein of the invention or part thereof may be used to identify inhibitors for mechanistic and clinical applications. Such inhibitors may then be used to identify or quantify the protein of the invention in a sample, and to diagnose, treat or prevent any of the disorders where the protein's hydrolytic, immunostimulatory and/or inflammatory activities is/are undesirable and/or deleterious including but not limited to amyloidosis, colitis, lysosomal diseases, inflammatory and immune disorders including allergies and leukaemia. The protein of the invention may also be used to monitor host cell membranes for neoplastic transformation.

[0766] It will be appreciated that all characteristics and uses of the polynucleotides of SEQ ID NOs:27 and 362 and polypeptides of SEQ ID NO:196 and 479, described throughout the present application also pertain to the human cDNA of clone 482181, and the polypeptides encoded thereby.

Angiogenin Protein of SEQ ID NO: 176 (Internal Designation 114180) and Related Protein of SEQ ID NO:461

[0767] The polypeptides of SEQ ID NO:176 and SEQ ID NO:461 encoded by the extended cDNA SEQ ID NO:7 and SEQ ID NO:344, respectively, are ribonucleases that belongs to the pancreatic ribonuclease family (see reviews from Beintema, (1998) Cell. Mol. Life Sci. 54:763-5; Beintema and Kleineidam, (1998) Cell. Mol. Life Sci. 54:825-32, which disclosures are hereby incorporated by reference in their entireties). It will be appreciated that all characteristics and uses of the polynucleotides of SEQ ID NO:7 and SEQ ID NO:344 and polypeptides of SEQ ID NO:176 and SEQ ID NO:461, described throughout the present application also pertain to the human cDNA of clone 114180, and the polypeptides encoded thereby. In addition, the protein of the invention plays a role in angiogenesis as an angiogenin variant protein (see review from Badet, (1999) Pathol. Biol. 74:345-51, which disclosure is hereby incorporated by reference in its entirety). Preferred polypeptides of the invention are polypeptides comprising the amino acids of SEQ ID NO: 176 from positions 19 to 75, from positions 26 to 75, or from positions 63 to 69. Other preferred polypeptides of the invention are fragments of SEQ ID NO: 176 having any of the biological activity described herein. The ribonuclease activity of the protein of the invention or part thereof may be assayed using any of the assays known to those skilled in the art including those described in U.S. Pat. No. 5,866,119, which disclosure is hereby incorporated by reference in its entirety. The angiogenic activity of the protein of the invention or part thereof may be assayed using any of the assays known to those skilled in the art including those described by Fett et al. (1985) Biochem. 24, 5480-5486, which disclosure is hereby incorporated by reference in its entirety.

[0768] Ribonucleases are proteins which catalyze the hydrolysis of phosphodiester bonds in RNA chains. Pancreatic ribonucleases are pyrimidic-specific ribonucleases present in high quantity in the pancreas of a number of mammalia taxa and of a few reptiles. In addition to their function in hydrolysis of RNA, ribonucleases have evolved to support a variety of other physiological activities. Such activities include anti-parasite, anti-bacterium, anti-virus, anti-neoplastic activities, neurotoxicity, and angiogenesis. For example, bovine seminal ribonuclease is anti-neoplastic (Laceetti, et al. (1992) Cancer Res. 52: 4582-4586, which disclosure is hereby incorporated by reference in its entirety). Some frog ribonucleases display both anti-viral and anti-neoplastic activity (Youle, et al. (1994) Proc. Natl. Acad. Sci. USA 91: 6012-6016; Mikulski, et al. (1990) J. Natl. Cancer Inst. 82: 151-152; and Wu, et al. (1993) J. Biol. Chem. 268: 10686-10693), which disclosures are hereby incorporated by reference in their entireties. Eosinophil-derived neurotoxin (EDN) and eosinophil cationic protein (ECP) are related ribonucleases which possess neurotoxicity (Beintema, et al. (1988) Biochemistry 27: 45304538; Ackerman, (1993) In Makino, and Fukuda, Eosinophils: Biological and Clinical Aspects. CRC Press, Boca Raton, Fla., pp 33-74), which disclosures are hereby incorporated by reference in their entireties. In addition, ECP exhibits cytotoxic, anti-parasitic, and anti-bacterial activities. A EDN-related ribonuclease, named RNase k6, is shown to express in normal human monocytes and neutrophils, suggesting a role for this ribonuclease in host defense (Rosenberg, and Dyer, (1996) Nuc. Acid. Res. 24: 3507-3513), which disclosure is hereby incorporated by reference in its entirety.

[0769] Angiogenin is a tRNA-specific ribonuclease which binds protein partners on the surface of endothelial cells for endocytosis. Potential partners of angiogenin include heparin, plasminogen, elastase, angiostatin, actin, and a 170 kDa receptor on the surface of endothelial cells [Strydom, (1998) Cell. Mol. Life Sci. 54, 811-824, which disclosure is hereby incorporated by reference in its entirety ]. Endocytosed angiogenin is translocated to the nucleus where it promotes endothelial invasiveness required for blood vessel formation (Moroianu, and Riordan, (1994) Proc. Natl. Acad. Sci. USA 91: 1217-1221, which disclosure is hereby incorporated by reference in its entirety).

[0770] Although originally isolated from medium conditioned by human colon cancer cells (Fett et al. (1985), supra), and subsequently shown to be produced by several other histological types of human tumors [Rybak, et al. (1987) Biochem. Biophys. Res, Commun. 146, 1240-1248; Olson, et al., (1995) Proc. Natl. Acad. Sci. U.S.A. 92, 442446, which disclosures are hereby incorporated by reference in their entireties], angiogenin also is a constituent of human plasma and normally circulates at a concentration of 250-360 ng/ml [Shimoyama, et al. (1996) Cancer Res. 56, 2703-2706; Blaser, et al. (1993) Eur. J. Clin. Chem. Clin. Biochem. 31, 513-516, which disclosures are hereby incorporated by reference in their entireties]. It has also been shown that recurrent gastric cancer patients had a much higher serum concentration of angiogenin than primary gastric cancer patients [Shimoyama, and Kaminishi, (2000) J. Cancer Res. Clin. Oncol. 126, 468474, which disclosure is hereby incorporated by reference in its entirety].

[0771] Angiogenin is a potent inducer of angiogenesis [Fett, et al. supra]. Angiogenesis is a complex process of blood vessel formation comprising of several separate but interconnected steps at the cellular and biochemical level including: (i) activation of endothelial cells by the action of an angiogenic stimulus, (ii) adhesion and invasion of activated endothelial cells into the surrounding tissues and migration toward the source of the angiogenic stimulus, and (iii) proliferation and differentiation of endothelial cells to form a new microvasculature [Folkman, and Shing, (1992) J. Biol. Chem. 267, 10931-10934; Moscatelli, and Rifkin, (1988) Biochim. Biophys. Acta 948, 67-85, which disclosures are hereby incorporated by reference in their entireties]. While angiogenesis is a tightly-controlled process under usual physiological conditions, abnormal angiogenesis can have devastating consequences in pathological conditions such as arthritis, diabetic retinopathy and tumor growth. It is now well-established that the growth of virtually all solid tumors is angiogenesis dependent [Folkman, (1989) J. Natl. Cancer Inst. 82, 4-6, which disclosure is hereby incorporated by reference in its entirety]. Angiogenesis is also a prerequisite for the development of metastasis, since it provides the means whereby tumor cells disseminate from the original primary tumor and establish at distant sites [Mahadevan, and Hart, (1 990) Rev. Oncol. 3, 97-103; Blood, and Zetter (1990) Biochim. Biophys. Acta 1032, 89-118, which disclosures are hereby incorporated by reference in their entireties]. Therefore, interference with the process of tumor-induced angiogenesis can be an effective therapy for both primary and metastatic cancers. Indeed, several anti-angiogenic agents have been produced and are currently in the clinical trial stage.

[0772] The invention relates to methods and compositions using the protein of the invention or part thereof to hydrolyze one or several substrates, preferably nucleic acids, more preferably RNA, alone or in combination with other substances. For example, the protein of the invention or part thereof is added to a sample containing the substrate(s) in conditions allowing hydrolysis, and allowed to catalyze the hydrolysis of the substrate(s). Hydrolysis conditions as described in the U.S. Pat. No. 5,866,119 may be used, which disclosure is hereby incorporated by reference in its entirety.

[0773] In a preferred embodiment, the protein of the invention or part thereof may be used to remove contaminating RNA in a biological sample, alone or in combination with other nucleases. In a more preferred embodiment, the protein of the invention or part thereof may be used to purify DNA preparations from contaminating RNA, to remove RNA templates prior to second strand synthesis and prior to analysis of in vitro translation products. Compositions comprising the protein of the present invention or part thereof are added to biological samples as a “cocktail” with other nucleases. The advantage of using a cocktail of hydrolytic enzymes is that one is able to hydrolyze a wide range of substrates without knowing the specificity of any of the enzymes. Such cocktails of nucleases are commonly used in molecular biology assays, for example to remove unbound RNA in RNAse protection assays. Using a cocktail of hydrolytic enzymes also protects a sample from a wide range of future unknown RNA contaminants from a vast number of sources. For example, the protein of the invention or part thereof is added to samples where contaminating substrates is undesirable. Alternatively, the protein of the invention or part thereof may be bound to a chromatographic support, either alone or in combination with other hydrolytic enzymes, using techniques well known in the art, to form an affinity chromatography column. A sample containing the undesirable substrate is run through the column to remove the substrate. Immobilizing the protein of the invention or part thereof on a support is particularly advantageous for those embodiments in which the method is to be practiced on a commercial scale. This immobilization facilitates the removal of the enzyme from the batch of product and subsequent reuse of the enzyme. Immobilization of the protein of the invention or part thereof can be accomplished, for example, by inserting a cellulose-binding domain in the protein. One of skill in the art will understand that other methods of immobilization could also be used and are described in the available literature. Alternatively, the same methods may be used to identify new substrates.

[0774] In another embodiment, the protein of the invention or part thereof may be used to decontaminate or disinfect samples infected by undesirable parasite, bacteria and/or viruses using any of the methods known to those skilled in the art including those described in Youle et al, (1994), supra; Mikulski et al (1990) supra, Wu et al (1993) supra.

[0775] In another embodiment, the present invention relates to compositions and methods using the protein of the invention or part thereof to selectively kill cells. The protein of the invention or part thereof is linked to a recognition moiety capable of binding to a chosen cell, such as lectins, receptors or antibodies thus generating cytotoxic reagents using methods and techniques described in U.S. Pat. No. 5,955,073, which disclosure is hereby incorporated by reference in its entirety.

[0776] In still another embodiment, the invention relates to compositions and methods using the protein of the invention or part thereof to stimulate cell proliferation both in vitro and in vivo, especially endothelial cell growth. For example, soluble forms of the protein of the invention or part thereof may be added to cell culture medium in an amount effective to stimulate cell proliferation.

[0777] In still another embodiment, the protein of the invention or part thereof may be used in the diagnosis, prevention and/or treatment of disorders associated with excessive angiogenesis such as tumor growth, arthritis or diabetic retinopathy.

[0778] In a preferred embodiment, the protein of the invention may be used as a diagnostic marker to evaluate the risk of a given individual to develop a tumor, to evaluate the risk of recurrence of tumors or to evaluate the degree of cancer aggressiveness based on the facts that the level of circulating angiogenin is lower in normal individuals than in patients bearing tumors, and is lower in patients with primary cancers compared to patients with reoccurent tumors, as stated above. Thus, quantitative immunoassays can be used for the detection of abnormal levels of either the protein of SEQ ID NO: 176 or the mRNA encoding such protein as the polynucleotide of SEQ ID No:7, thereby identifying those individuals at risk for the development of tumors or the recurrence of tumors. Detection of abnormal levels of the protein of the invention may be performed using any techniques known to those skilled in the art including those described elsewhere in the application. For example, antibodies binding specifically to the protein of the invention, or fragments thereof, may be used in routine immunoassays to screen for the presence or absence of the protein of the invention, or fragments thereof. Alternatively, the nucleic acids which encode the protein of the invention, or fragments thereof, may be used in hybridization assays to detect and/or quantity the expression of said protein.

[0779] Another aspect of the invention provides for molecules which inhibit, or reduce, the biological activity or expression of SEQ ID NO: 276. Such molecules may be be administered to patients to prevent vascularization, especially tumor vascularization, thereby limiting tumor growth. Such antagonists and/or inhibitors may be antibodies specific for the protein of the invention that can be used directly as an antagonist, or indirectly as a targeting or delivery mechanism for bringing a pharmaceutical agent to cells or tissue which express the protein of the invention. Neutralizing antibodies, (i.e., those which inhibit protein-protein interactions) are especially preferred for therapeutic use. Alternatively, such molecules may be mutated forms of the protein of the invention or truncated forms which will be able to bind to the partners of the protein of the invention and compete with if for partners but without eliciting any of its biological activities. Other methods to inhibit the expression of the protein of the invention include antisense and triple helix strategies as described herein. Other antagonists or inhibitors of the protein of the invention may be produced using methods which are generally known in the art, including the screening of libraries of pharmaceutical agents to identify those which specifically bind the protein of the invention. The protein of the invention, or part thereof, preferably its functional or immunogenic fragments, or oligopeptides related thereto, can be used for screening libraries of compounds in any of a variety of drug screening techniques including those described herein.

Protease Inhibitor Protein of SEQ ID NO: 181 (Internal Designation 1000771934) and Related Protein of SEQ ID NO:466

[0780] The protein of SEQ ID NOs:181 and 466 encoded by the extended cDNA SEQ ID NO:12 and 349, respectively, is a protease inhibitor belonging to the WAP-type disulfide core family. It will be appreciated that all characteristics and uses of the polynucleotides of SEQ ID NOs:12 and 349 and polypeptides of SEQ ID NOs:181 and 466, described throughout the present application also pertain to the human cDNA of clone 1000771934, and the polypeptides encoded thereby. Preferred polypeptides of the invention are polypeptides comprising the amino acid fragments of SEQ ID NO: 181 from positions 32 to 73, 49 to 62, 76 to 122, 97 to 110 or any combination thereof. Other preferred polypeptides of the invention are fragments of SEQ ID NO:181 having any of the biological activity described herein. The protease inhibitor activity of the protein of the invention or part thereof may be assessed using any techniques known to those skilled in the art. Possible substrates for the protein of the invention include are not limited to trypsin, chymotrypsin, leukoproteinase, elastase, subtilisin, type IV collagenase and other serine proteases.

[0781] Proteases, which cleave proteins, are largely used in industry including in food processing, brewing, and alcohol production. Proteases are important components of laundry detergents and other products. Within biological research, proteases are used in purification processes to degrade unwanted proteins. It is often desirable to employ proteases of low specificity or mixtures of more specific proteases to obtain the necessary degree of degradation.

[0782] Proteases are also key components of a broad range of biological pathways, including blood coagulation and digestion. For example, the absence or insufficiency of a protease can result in a pathological condition that can be treated by replacement or augmentation therapy. Such therapies include the treatment of hemophilia with clotting factors VIII, IX, and VIIa. In another application, the proteolytic enzyme tissue plasminogen activator (t-PA) is used to activate the body's clot lysing mechanism, thereby reducing morbitity resulting from myocardial infarction. The protease thrombin is used to initiate the clotting of fibrinogen-based tissue adhesives during surgery. Neutrophils produce several antibacterial serine proteases (Gabay, Ciba Found. Symp. 186:237-247, 1994; Scocchi et al., Eur. J. Biochem. 209:589-595, 1992, which disclosures are hereby incorporated by reference in their entireties). Proteases also regulate cellular processes through receptor-mediated pathways by proteolytic activation of the cognate receptor (Vu et al., Cell 64:1057-1068, 1991; Blackhart et al., J. Biol. Chem. 271:16466-16471, 1996, which disclosures are hereby incorporated by reference in their entireties).

[0783] Overproduction or lack of regulation of proteases can also have pathological consequences. Elastase, released within the lung in response to the presence of foreign particles, can damage lung tissue if its activity is not tightly regulated. Emphysema in smokers is believed to arise from an imbalance between elastase and its inhibitor, alpha-1-antitrypsin. This balance may be restored by administration of exogenous alpha-1-antitrypsin.

[0784] In addition, protease inhibitors have been shown to inhibit the growth of microorganisms including human pathogenic bacteria such as strains of group A streptococci, including antibiotic-resistant strains (Merigan, T. et al (1996) Ann Intern Med 124:1039-1050; Stoka, V. (1995) FEBS. Lett 370:101-104; Vonderfecht, S. et al (1988) J Clin Invest 82:2011-2016; Collins, A. et al (1991) Antimicrob Agents Chemother 35:2444-2446, which disclosures are hereby incorporated by reference in their entireties).

[0785] In view of the growing use of proteases in industry, research, and medicine, there is an ongoing need in the art for new enzymes and new enzyme inhibitors. The present invention addresses these needs.

[0786] The invention relates to compositions and methods using the protein of the invention or part thereof to inhibit proteases, both in vitro or in vivo. Since proteases play an important role in the regulation of many biological processes in virtually all living organisms as well as a major role in diseases, inhibitors of proteases are useful in a wide variety of applications.

[0787] In one embodiment, the protein of the invention or part thereof may be useful to quantify the amount of a given protease in a biological sample, and thus used in assays and diagnostic kits for the quantification of proteases in bodily fluids or other tissue samples, in addition to bacterial, fungal, plant, yeast, viral or mammalian cell cultures. In a preferred embodiment, the sample is assayed using a standard protease substrate. A known concentration of protease inhibitor is added, and allowed to bind to a particular protease present. The protease assay is then rerun, and the loss of activity is correlated to the protease inhibitor activity using techniques well known to those skilled in the art.

[0788] In addition, the protein of the invention or part thereof may be used to remove, identify or inhibit contaminating proteases in a sample. Compositions comprising the polypeptides of the present invention may be added to biological samples as a “cocktail” with other protease inhibitors to prevent degradation of protein samples. The advantage of using a cocktail of protease inhibitors is that one is able to inhibit a wide range of proteases without knowing the specificity of any of the proteases. Using a cocktail of protease inhibitors also protects a protein sample from a wide range of future unknown proteases which may contaminate a protein sample from a vast number of sources. For example, the protein of the invention or part thereof are added to samples where proteolytic degradation by contaminating proteases is undesirable. Such protease inhibitor cocktails (see for example the ready to use cocktails sold by Sigma) are widely used in research laboratory assays to inhibit proteases susceptible of degrading a protein of interest for which the assay is to be performed. Alternatively, the protein of the invention or part thereof may be bound to a chromatographic support, either alone or in combination with other protease inhibitor, using techniques well known in the art, to form an affinity chromatography column. A sample containing the undesirable protease is run through the column to remove the protease. Alternatively, the same methods may be used to identify new proteases.

[0789] In a preferred embodiment, the protein of the invention or part thereof may be used to inhibit proteases implicated in a number of diseases where cellular proteolysis occur such as diseases characterized by tissue degradation including but not limited to arthritis, muscular dystrophy, inflammation, tumor invasion, glomerulonephritis, parasite-borne infections, Alzheimer's disease, periodontal disease, and cancer metastasis.

[0790] In another preferred embodiment, the protein of the invention or part thereof may be useful to inhibit exogenous proteases, both in vivo and in vitro, implicated in a number of infectious diseases including but not limited to gingivitis, malaria, leishmaniasis, filariasis, osteoporosis and osteoarthritis, and other bacterial, and parasite-borne or viral infections. In particular, the protein of the invention or part thereof may offer applications in viral diseases where the proteolysis of primary polypeptide precursors is essential to the replication of the virus, as for HIV and HCV.

[0791] In another embodiment, the protease inhibitors of the present invention may be used as antibacterial agents to retard or inhibit the growth of certain bacteria either in vitro or in vivo. Particularly, the polypeptides of the present invention may be used to inhibit the growth of group A streptococci on non-living matter such as surgical instruments, laboratory glassware and plasticware, and in culture of living plant, fungi, and animal cells.

[0792] Furthermore, the protease inhibitors of the present invention find use in drug potentiation applications. For example, therapeutic agents such as antibiotics or antitumor drugs can be inactivated through proteolysis by endogenous proteases, thus rendering the administered drug less effective or inactive. Accordingly, the protease inhibitors of the invention may be administered to a patient in conjunction with a therapeutic agent in order to potentiate or increase the activity of the drug. This co-administration may be by simultaneous administration, such as a mixture of the protease inhibitor and the drug, or by separate simultaneous or sequential administration.

Serpin Protein of SEQ ID NO: 179 (Internal Designation 784093) and Related Protein of SEQ ID NO:464

[0793] The protein of SEQ ID NOs: 179 and 464 and encoded by the extended cDNA SEQ ID NOs:10 and 347, respectively, is a serine protease inhibitor. It will be appreciated that all characteristics and uses of the polynucleotides of SEQ ID NOs:10 and 347 and polypeptides of SEQ ID NOs:179 and 464, described throughout the present application also pertain to the human cDNA of clone 784093, and the polypeptides encoded thereby. Preferred polypeptides of the invention are polypeptides comprising the amino acid fragments of SEQ ID NO:179 from positions 47 to 139. Other preferred polypeptides of the invention are fragments of SEQ ID NO:179 having any of the biological activity described herein. The protease inhibitor activity of the protein of the invention or part thereof may be assessed using any techniques known to those skilled in the art including those disclosed in the U.S. Pat. No. 5,955,284. Possible substrates for the protein of the invention include are not limited to serine proteases such as elastase, trypsin, chymotrypsin, thrombin III, plasmin, heparin, complement II, plasminogen activator, protein C, interleukin-IB coverting enzyme, preferably trypsin, elastase, and chymotrypsin.

[0794] Proteases are key components of a broad range of biological pathways, including blood coagulation and digestion. For example, the absence or insufficiency of a protease can result in a pathological condition that can be treated by replacement or augmentation therapy. Such therapies include the treatment of hemophilia with clotting factors VIII, IX, and VIIa. In another application, the proteolytic enzyme tissue plasminogen activator (t-PA) is used to activate the body's clot lysing mechanism, thereby reducing morbitity resulting from myocardial infarction. The protease thrombin is used to initiate the clotting of fibrinogen-based tissue adhesives during surgery. Neutrophils produce several antibacterial serine proteases (Gabay, Ciba Found. Symp. 186:237-247, 1994; Scocchi et al., Eur. J. Biochem. 209:589-595, 1992, which disclosures are hereby incorporated by reference in their entireties). Proteases also regulate cellular processes through receptor-mediated pathways by proteolytic activation of the cognate receptor (Vu et al., Cell 64:1057-1068, 1991; Blackhart et al., J. Biol. Chem. 271:16466-16471, 1996, which disclosures are hereby incorporated by reference in their entireties).

[0795] Overproduction or lack of regulation of proteases can also have pathological consequences. Elastase, released within the lung in response to the presence of foreign particles, can damage lung tissue if its activity is not tightly regulated. Emphysema in smokers is believed to arise from an imbalance between elastase and its inhibitor, alpha-1-antitrypsin. This balance may be restored by administration of exogenous alpha-1-antitrypsin.

[0796] The serine proteases (SP) are a large family of proteolytic enzymes that include the digestive enzymes, trypsin and chymotrypsin, components of the complement cascade and of the blood-clotting cascade, and enzymes that control the degradation and turnover of macromolecules of the extracellular matrix. SP are so named because of the presence of a serine residue in the active catalytic site for protein cleavage. They are characterized by a catalytic triad of serine, histidine, and aspartic acid residues. SP have a wide range of substrate specificities and can be subdivided into subfamilies on the basis of these specificities. The main sub-families are trypases (cleavage after arginine or lysine), aspases (cleavage after aspartate), chymases (cleavage after phenylalanine or leucine), metases (cleavage after methionine), and serases (cleavage after serine).

[0797] Serine proteases are used for a variety of industrial purposes. For example, the serine protease subtilisin is used in laundry detergents to aid in the removal of proteinaceous stains (e.g., Crabb, ACS Symposium Series 460:82-94, 1991, which disclosure is hereby incorporated by reference in its entirety). In the food processing industry, serine proteases are used to produce protein-rich concentrates from fish and livestock, and in the preparation of dairy products (Kida et al., Journal of Fermentation and Bioengineering 80:478-484, 1995; Haard and Simpson, in Martin, A. M., ed., Fisheries Processing: Biotechnological Applications, Chapman and Hall, London, 1994, 132-154; Bos et al., European Patent Office Publication 494 149 A1, which disclosures are hereby incorporated by reference in their entireties).

[0798] Serpins are irreversible serine protease inhibitors which are principally located extracellularly. Proteins which have been assigned to the serpin family include the following: .alpha.-1 protease inhibitor,.alpha.-1-antichymotrypsin, antithrombin III, .alpha.-2-antiplasmin, heparin cofactor II, complement C1 inhibitor, plasminogen activator inhibitors 1 and 2, glia derived nexin, protein C inhibitor, rat hepatocyte inhibitors, crmA (a viral serpin which inhibits interleukin 1-.beta. cleavage enzyme), human squamous cell carcinoma antigen which may modulate the host immune response against tumor cells, human maspin which seems to function as a tumor suppressor, lepidopteran protease inhibitor, leukocyte elastase inhibitor (the only known intracellular serpin), and products from three orthopoxviruses (these products may be involved in the regulation of the blood clotting cascade and/or of the complement cascade in the mammalian host).

[0799] In view of the growing use of proteases in industry, research, and medicine, there is an ongoing need in the art for new enzymes and new enzyme inhibitors. The present invention addresses these needs.

[0800] In one embodiment, the protein of the invention or part thereof may be useful to quantify the amount of a given protease in a biological sample, and thus used in assays and diagnostic kits for the quantification of proteases in bodily fluids or other tissue samples, in addition to bacterial, fungal, plant, yeast, viral or mammalian cell cultures. In a preferred embodiment, the sample is assayed using a standard protease substrate. A known concentration of protease inhibitor is added, and allowed to bind to a particular protease present. The protease assay is then rerun, and the loss of activity is correlated to the protease inhibitor activity using techniques well known to those skilled in the art. Preferred proteases in this embodiment are serine protease, more preferably elastase, trypsin and chymotrypsin.

[0801] In addition, the protein of the invention or part thereof may be used to remove, identify or inhibit contaminating proteases in a sample. Compositions comprising the polypeptides of the present invention may be added to biological samples as a “cocktail” with other protease inhibitors to prevent degradation of protein samples. The advantage of using a cocktail of protease inhibitors is that one is able to inhibit a wide range of proteases without knowing the specificity of any of the proteases. Using a cocktail of protease inhibitors also protects a protein sample from a wide range of future unknown proteases which may contaminate a protein sample from a vast number of sources. For example, the protein of the invention or part thereof are added to samples where proteolytic degradation by contaminating proteases is undesirable. Such protease inhibitor cocktails (see for example the ready to use cocktails sold by Sigma) are widely used in research laboratory assays to inhibit proteases susceptible of degrading a protein of interest for which the assay is to be performed. Alternatively, the protein of the invention or part thereof may be bound to a chromatographic support, either alone or in combination with other protease inhibitor, using techniques well known in the art, to form an affinity chromatography column. A sample containing the undesirable protease is run through the column to remove the protease. Alternatively, the same methods may be used to identify new proteases.

[0802] In a preferred embodiment, the protein of the invention or part thereof may be used to inhibit proteases implicated in a number of diseases where cellular proteolysis occur such as diseases characterized by tissue degradation including but not limited to arthritis, muscular dystrophy, inflammation, tumor invasion, glomerulonephritis, parasite-borne infections, Alzheimer's disease, periodontal disease, and cancer metastasis. In a more preferred embodiment, the invention relates to compositions and methods to use the protein of the invention or part thereof in diseases characterized by an abnormally elevated levels of trypsin, chymotrypsin or elastase, including but not limited to chronic emphysema of the lungs, cirrhosis, liver failure, cystic fibrosis, alpha1-antitrypsin deficiency associated disorders such as aneurysm or toxic shock. For prevention and/or treatment purposes, the protein of the invention may be used using any of the gene therapy methods described herein or known to those skilled in the art.

[0803] In another preferred embodiment, the protein of the invention or part thereof may be useful to inhibit exogenous proteases, both in vivo and in vitro, implicated in a number of infectious diseases including but not limited to gingivitis, malaria, leishmaniasis, filariasis, osteoporosis and osteoarthritis, and other bacterial, and parasite-borne or viral infections. In particular, the protein of the invention or part thereof may offer applications in viral diseases where the proteolysis of primary polypeptide precursors is essential to the replication of the virus, as for HIV and HCV.

[0804] In another embodiment, the protease inhibitors of the present invention may be used as antibacterial agents to retard or inhibit the growth of certain bacteria either in vitro or in vivo. Particularly, an amount of the polypeptides of the present invention effective to inhibit proliferation may be used to inhibit the growth of group A streptococci on non-living matter such as surgical instruments, laboratory glassware and plasticware, and in culture of living plant, fungi, and animal cells.

[0805] Furthermore, the protease inhibitors of the present invention find use in drug potentiation applications. For example, therapeutic agents such as antibiotics or antitumor drugs can be inactivated through proteolysis by endogenous proteases, thus rendering the administered drug less effective or inactive. Accordingly, the protease inhibitors of the invention may be administered to a patient in conjunction with a therapeutic agent in order to potentiate or increase the activity of the drug. This co-administration may be by simultaneous administration, such as a mixture of the protease inhibitor and the drug, or by separate simultaneous or sequential administration.

ATPKf Protein Sequence of SEQ ID No.253 (Internal Designation 1000867870)

[0806] The protein of SEQ ID NO:253 encoded by the extended cDNA SEQ ID NO:84 and relate polynucleotides of SEQ ID NO:404 is a variant of the human mitochondrial ATP synthase f subunit or ATPK (E.C. 3.6.1.34) and, as such, plays a role in cellular respiration. Preferred polypeptides of the invention are are polypeptides comprising the amino acids of SEQ ID NO: 253 from positions 5 to 88. Other preferred polypeptides of the invention are fragments of SEQ ID NO: 253 having any of the biological activity described herein. It will be appreciated that all characteristics and uses of the polynucleotides of SEQ ID NOs:84 and 404 and polypeptides of SEQ ID NO: 253 described throughout the present application also pertain to the human cDNA of clone 1000867870, and the polypeptides encoded thereby.

[0807] The mitochondrial electron transport (or respiratory) chain is a series of enzyme complexes in the mitochondrial membrane that is responsible for the transport of electrons from NADH to oxygen and the coupling of this oxidation to the synthesis of ATP (oxidative phosphorylation). ATP then provides the primary source of energy for driving a cell's many energy-requiring reactions. ATP synthase (F0 F1 ATPase) is the enzyme complex at the terminus of this chain and serves as a reversible coupling device that interconverts the energies of an electrochemical proton gradient across the mitochondrial membrane into either the synthesis or hydrolysis of ATP. This gradient is produced by other enzymes of the respiratory chain in the course of electron transport from NADH to oxygen. When the cell's energy demands are high, electron transport from NADH to oxygen generates an electrochemical gradient across the mitochondrial membrane. Proton translocation from the outer to the inner side of the membrane drives the synthesis of ATP. Under conditions of low energy requirements and when there is an excess of ATP present, this electrochemical gradient is reversed and ATP synthase hydrolyzes ATP. The energy of hydrolysis is used to pump protons out of the mitochondrial matrix. ATP synthase is, therefore, a dual complex, the F0 portion of which is a transmembrane proton carrier or pump, and the F1 portion of which is catalytic and synthesizes or hydrolyzes ATP. Mammalian ATP synthase complex consists of sixteen different polypeptides (Walker, J. E. and Collinson, T. R. (1994) FEBS Lett.346: 39-43, which disclosure is hereby incorporated by reference in its entirety). Six of these polypeptides (subunits alpha, beta, gamma, delta, epsilon, and an ATPase inhibitor protein IF I) comprise the globular catalytic F1 ATPase portion of the complex, which lies outside of the mitochondrial membrane. The remaining ten polypeptides (subunits a, b, c, d, e, f, g, F6, OSCP, and A6L) comprise the proton-translocating, membrane spanning F0 portion of the complex. Like other members of the respiratory chain, all but two of the polypeptide subunits of ATP synthase are nuclear gene products that are imported into the mitochondria. Enzyme complexes similar to mammalian ATP synthase are found in all cell types and in chloroplast and bacterial membranes. This universality indicates the central importance of this enzyme to ATP metabolism. Transcriptional regulation of these nuclear encoded genes appears to be the predominant means for controlling the biogenesis of ATP synthase. Multiple mitochondrial pathologies exist because of the essential role of mitochondrial oxidative phosphorylation in cellular energy production, in the generation of reactive oxygen species and in the initation of apoptosis (Wallace, Science, 283:1482-1488, 1999, which disclosure is hereby incorporated by reference in its entirety). It is now clear that mitochondrial diseases encompass an assemblage of clinical problems commonly involving tissues that have high energy requirements such as heart, muscle and the renal and endocrine systems. Over the past 11 years, a considerable body of evidence has accumulated implicating defects in the mitochondrial energy-generating pathway, oxidative phosphorylation, in a wide variety of degenerative diseases including myopathy and cardiomyopathy. Most classes of pathogenic mitochondrial DNA mutations affect the heart, in association with a variety of other clinical manifestations that can include skeletal muscle, the central nervous system (including eye), the endocrine system, and the renal system. Nuclear mutations causing mitochondrial disorders have been described. They are often found in highly conserved subunits. Mitochondrial disorders with nuclear mutations include: myopathies (PEO, MNGIE, congenital muscular dystrophy, carnitine disorders), encephalopathies (Leigh, Infantile, Wilson's disease, Deafness-Dystonia syndrome), other systemic disorders and cardiomyopathies.

[0808] The discovery of a new ATP synthase subunit, and polynucleotides encoding it satisfy a need in the art by providing new compositions which are useful for the diagnosis, prevention, and treatment of cancer, myopathies, immune disorders, and neurological disorders.

[0809] An object of the present invention relates to compositions and methods of targeting heterologous compounds, either polypeptides or polynucleotides to mitochondria by recombinantly or chemically fusing a fragment of the protein of the invention to an heterologous polypeptide or polynucleotide. Preferred fragments are signal peptide, amphiphilic alpha helices and/or any other fragments of the protein of the invention, or part thereof, that may contain targeting signals for mitochondria including but not limited to matrix targeting signals as defined in Herrman and Neupert, Curr. Opinion Microbiol. 3:210-4 (2000); Bhagwat et al. J. Biol. Chem. 274:24014-22 (1999), Murphy Trends Biotechnol. 15:326-30 (1997); Glaser et al. Plant Mol Biol 38:311-38 (1998); Ciminale et al. Oncogene 18:4505-14 (1999), which disclosures are hereby incorporated by reference in their entireties. Such heterologous compounds may be used to modulate mitochondria's activities. For example, they may be used to induce and/or prevent mitochondrial-induced apoptosis or necrosis. In addition, heterologous polynucleotides may be used for mitochondrial gene therapy to replace a defective mitochondrial gene and/or to inhibit the deleterious expression of a mitochondrial gene.

[0810] The invention further relates to methods and compositions using the protein of the invention or part thereof to diagnose, prevent and/or treat several disorders in which mitochondrial respiratory electron transport chain is impaired, including but not limited to mitochondriocytopathies, necrosis, aging, myopathies, cancer and neurodegenerative diseases such as Alzheimer's disease, Huntington's disease, Parkinson's disease, epilepsy, Down's syndrome, dementia, multiple sclerosis, and amyotrophic lateral sclerosis. For diagnostic purposes, the expression of the protein of the invention could be investigated using any of the Northern blotting, RT-PCR or immunoblotting methods described herein and compared to the expression in control individuals. For prevention and/or treatment purposes, the protein of the invention may be used to enhance electron transport and increase energy delivery using any of the gene therapy methods described herein or known to those skilled in the art.

[0811] In another embodiment, the invention further relates to methods and compositions using the protein of the invention or part thereof to diagnose, prevent and/or treat several disorders in which mitochondrial respiratory electron transport chain needs to be impaired, including but not limited to Sjogren's syndrome, Addison's disease, bronchitis, dermatomyositis, polymyositis, glomerulonephritis, diabetes mellitus, emphysema, Graves' disease, atrophic gastritis, lupus erythematosus, myasthenia gravis, multiple sclerosis, autoimmune thyroiditis, ulcerative colitis, anemia, pancreatitis, scleroderma, rheumatoid and osteoarthritis, asthma, allergic rhinitis, atopic dermatitis, dermatomyositis, polymyositis, and gout, using any techniques known to those skilled in the art including the antisense or triple helices strategies described herein.

[0812] Moreover, antibodies to the protein of the invention or part thereof may be used for detection of mitochondria organelles and/or mitochondrial membranes using any techniques known to those skilled in the art.

Oligomerization Protein Sequence of SEQ ID No. 310 (Internal Designation D150568)

[0813] The protein of SEQ ID NO: 310 encoded by the cDNA of SEQ ID NO: 141 and 435, is able to form homo-oligomers. Preferred polypeptides of the invention are polypeptides comprising the amino acids of SEQ ID NO:310 from positions 1 to 109. Other preferred polypeptides of the invention are fragments of SEQ ID NO: 310 having any of the biological activities described herein.

[0814] Multivalency is a prerequisite for a variety of macromolecular interactions such as binding of antibodies or lectins to specific targets, ligand recognition, activation or inhibition of receptors and cell adhesion. Dimerization and oligomerization of proteins are thus general biological control mechanisms that contribute to the activation of cell membrane receptors, transcription factors, vesicle fusion proteins, and other classes of intra- and extracellular proteins.

[0815] Multimerization domains have been shown to be useful tools in several areas of biotechnology, especially in protein engineering. For example, Tso et al have used leucine zippers for producing bispecific antibody heterodimers (U.S. Pat. No. 5,932,448)/Methods of preparing soluble oligomeric proteins using leucine zippers have been described by Conrad et al (U.S. Pat. No. 5,965,712), Ciardelli et al (U.S. Pat. No. 5,837,816), Spriggs et al (WO9410308)/Leucine zipper forming sequences have been used by Pelletier et al in protein fragment complementation assays to detect biomolecular interactions (WO9834120), which disclosures are hereby incorporated by reference in their entireties. Because of their usefulness in biotechnology, it is thus highly interesting to isolate new multimerization domains.

[0816] The multimerization activity of the protein of the invention or part thereof may be assayed using any of the assays known to those skilled in the art including circular dichroism spectrum, gel filtration chromatography and thermal melting analyses.

[0817] In one embodiment, the invention relates to compositions and methods of using the protein of the invention or part thereof for preparing soluble multimeric proteins, which consist in multimers of fusion proteins containing a multimerization domain fused to a protein of interest, using any technique known to those skilled in the art including those described in international patent WO9410308, which disclosure is hereby incorporated by reference in its entirety.

[0818] In another embodiment, the protein of the invention or part thereof or derivative thereof is used for detection and determination of an analyte in a biological liquid using the teachings of U.S. Pat. No. 5,643,731, which disclosure is hereby incorporated by reference in its entirety. Briefly, a first multimerization domain is immobilized on a solid support and the second multimerization domain is coupled to a specific binding partner for an analyte in a biological fluid. The two peptides are then brought into contact thereby immobilizing the binding partner on the solid phase. The biological sample is then contacted with the immobilized binding partner and the amount of analyte in the sample bound to the binding partner determined.

[0819] In still another embodiment, the protein of the invention or part thereof may be used to construct multimerization devices comprising hybrid molecules with a functional domain fused to a multimerization domain in order to yield multimeric complexes with improved pharmacokinetic and pharmacological properties as described in WO0102440, which disclosure is hereby incorporated by reference in its entirety. In a preferred embodiment, the protein of the invention or part thereof may be used to construct different fusion proteins with different functional domains such as enzyme moieties or cytotoxic moieties. Vectors encoding these different proteins may then be transfected in the same host cell in conditions allowing for multimerization, thus yielding multimeric multifunctional complexes.

Chaperone Protein of SEQ ID NO: 303 (Internal Designation D637548)

[0820] The protein of SEQ ID NO: 303 encoded by the cDNA of SEQ ID NO:134 is a chaperonin. Accordingly, the protein of SEQ ID NO:303 plays a role in protein synthesis/folding, cellular trafficking, and the cellular stress response. In addition, the protein of SEQ ID No: 303 has immunosupressant and growth factor properties. It is able to depress delayed type hypersensitivity reactions. It is a product of primary and neoplastic cell proliferation and under these conditions acts as a growth factor. It is also a product of platelet activation and may play a part in wound healing and skin repair. Preferred polypeptides of the invention are polypeptides comprising the amino acids of SEQ ID NO:303 from positions 9 to 33, or from positions 7 to 101. Other preferred polypeptides of the invention are fragments of SEQ ID NO: 303 having any of the biological activities described herein. The different activities of the protein of the invention or part thereof may be assayed using any of the assays described in U.S. Pat. No. 6,117,421 or any of the assays referred into U.S. Pat. No. 6117,421, which disclosures are hereby incorporated by reference in their entireties.

[0821] Chaperonins belong to a wider class of molecular chaperones, molecules involved in post-translational folding, targeting and assembly of other proteins, but which do not themselves form part of the final assembled structure as discussed by Ellis et al., 1991, Annu. Rev. Biochem. 60 321-347, which disclosures are hereby incorporated by reference in their entireties. Most molecular chaperones are “heat shock” or “stress” proteins (hsp); i.e. their production is induced or increased by a variety of cellular insults (such as metabolic disruption, oxygen radicals, inflammation, infection and transformation), heat being only one of the better studies stresses as reviewed by Lindquist et al., 1988, Annu. Rev. Genet. 22 631-677, which disclosure is hereby incorporated by reference in its entirety. As well as these quantitative changes in specific protein levels, stress can induce the movement of constitutively produced stress proteins to different cellular compartments as referred to in the Lindquist reference mentioned above. The heat shock response is one of the most highly conserved genetic system known and the various heat shock protein families are among the most evolutionarily stable proteins in existence. The major stress proteins accumulate to very high levels in stressed cells but occur at low to moderate levels in cells that have not been stressed. As well as enabling cells to cope under adverse conditions, members of these families perform essential functions in normal cells.

[0822] Chaperones are also involved in a number of disorders, especially autoimmune diseases such as type 1 diabetes, rheumatoid arthritis, systemic lupus erythematosus, Sjogren syndrome, and mixed connective tissue disease (Feige et al. EXS 1996; 77:359-73; Feili-Hariri et al. J Autoimmun 2000; 14:133-42, which disclosures are hereby incorporated by reference in their entireties). Chaperones are also involved in various disorders including tuberculosis and leprosy (Zugel et al. Clin Microbiol Rev 1999; 12:19-39), neurogenerative disorders such as Alzheimer and Parkinson diseases (Yoo et al. J Neural Transm Suppl 1999; 57:315-22), and malignant disorders (Csermely et al. Pharmacol Ther 1998; 79:129-68), which disclosures are hereby incorporated by reference in their entireties.

[0823] In one embodiment, the protein of the invention or part thereof may be used to detect a potential pregnancy, preferably within 6-24 hours of fertilization using the teaching of Morton et al., 1976, Proc. R. Soc. B. 193 413-41 and U.S. Pat. No. 6,117,421, which disclosures are hereby incorporated by reference in their entireties. Detection of the expression or activity of the protein of the invention may be performed using any techniques known to those skilled in the art including those described elsewhere in the application.

[0824] In another embodiment, molecules able to block the expression or activity of the protein of the invention, such as antibodies, antisense or triple helix oligonucleotides, dominant negative forms of the protein, polypeptides or small molecule inhibitors of the expression or activity of the proteins, may be used to induce abortion as described in U.S. Pat. No. 6,117,421.

[0825] In still another embodiment, the protein of the invention or part thereof may be used to treat and/or prevent infertility and miscarriage using the simple administration of the protein of the invention or part thereof or using any of the gene therapy methods described elsewhere in the application and the teaching of the U.S. Pat. No. 6,117,421.

[0826] In another embodiment, the present invention provide methods of using the present proteins to identify specific cell types in vitro and in vivo. For example, as chaperone proteins are often upregulated in response to cellular stress, the detection of cells expressing elevated levels of the proteins provides a tool for detecting cells under stress. As cellular stress has been implicated in a number of disorders, such as cardiovascular disorders, neurodegenerative disorders, and cancer, the ability to detect such stress thus provides a diagnostic or screening tool for such conditions.

[0827] In addition, the present polypeptides and polynucleotides can be used to develop diagnostic and screening assays for diseases characterized by an abnormal level or activity of the protein of SEQ ID NO: 303 such as malignant disorders of various types, and autoimmune diseases including type I diabetes, rheumatoid arthritis, systemic lupus erythematosus, Sjogren syndrome, Graves disease, multiple sclerosis, and mixed connective tissue disease. Such assays can be performed using any biological sample, such as serum or plasma.

[0828] In another embodiment, various disorders can be treated, attenuated and/or prevented by a protein of SEQ ID NO: 303, or part thereof, or any other compound that can affect the level or activity of the proteins such as nucleic acids, antibodies, or chemical substances. In a preferred embodiment, proteins or other compounds directed to the proteins of the invention can be used to treat or prevent disorders in which the activity or level of the protein of SEQ ID NO: 303 is unbalanced. Such diseases include, but are not limited to, infectious diseases, neurogenerative disorders as Alzheimer and Parkinson diseases, schizophrenia, alopecia, aging, atherosclerosis, malignant disorders of various types, and autoimmune diseases including type I diabetes, rheumatoid arthritis, systemic lupus erythematosus, Sjogren syndrome, mixed connective tissue disease, malignant disorders, autoimmune and any other neurodegenerative disorder. In another embodiment, the proteins of SEQ ID NO: 303 or part thereof can be used as vaccines for various disorders including, but not limited, to cancer (Wang et al. Immunol Invest 2000;29:131-7), tuberculosis (Silva et al. Microbes Infect 1999;1 :429-35), diabetes (Int Immunol 1999;1 1:957-66), and atherosclerosis (Xu et al. Arterioscler Thromb 1992; 12:789-99), which disclosures are hereby incorporated by reference in their entireties.

[0829] One embodiment of the present invention relates to methods and compositions using the protein of SEQ ID NO:303 or fragments thereof as a stabilizing adjuvant to slow down protein degradation, boost the yields of recombinant proteins, prevent the aggregation of proteins or regenerate denatured proteins. In a preferred embodiment, the protein of SEQ ID NO:303 of fragment thereof is mixed with a composition comprising the protein for which it is desired to slow down degradation, boost yield, or regenerate denatured proteins under conditions which facilitate the desired result. For example, numerous commercial assay kits commonly used by those skilled in the arts of molecular biology and biochemistry depend on the biological properties of proteins (mostly enzymes) which can be very short-lived in vitro due to the low stability of those proteins. An example is described in Eur. Patent DE4124286, the disclosure of which is incorporated herein by reference in its entirety, wherein the low intrinsic stability of test solutions used in optical tests is increased by addition of chaperone proteins, thus making the test more sensitive. Another example is given in U.S. Pat. No. 6,013,488, which disclosure is hereby incorporated by reference in its entirety, wherein a heat-labile reverse transcriptase is able to perform cDNA synthesis at high temperature levels in the presence of a chaperone.

[0830] The protein of SEQ ID NO:303 may also be used to increase the yield or activity of recombinant proteins, preferably secreted proteins. In recombinant DNA technology, a major unsolved problem is the solubility and biological activity of the recombinantly overexpressed protein in a host, especially a bacterial or yeast host. Many eukaryotic proteins, especially the secreted ones, require for correct folding a specific cellular machinery which is lacking in bacterial hosts such as E. coli or becomes insufficient in mammalian/yeast cells due to high expression of the protein. The ability of the protein of SEQ ID NO:303 or fragments thereof to ensure proper folding of recombinant proteins may be utilized as follows. The protein of SEQ ID NO:303, or fragment thereof, may be coexpressed with the recombinant protein in bacterial or eukaryotic hosts to cause the hosts to express the heterologous proteins or polypeptides in a form having increased solubility and/or biological activity. For example, the protein of SEQ ID NO:303 or fragments thereof may be used in the methods described in U.S. Pat. No. 5,773,245, the disclosure of which is incorporated herein by reference in its entirety. Therefore the invention relates to a method for the correct folding, deaggregation or prevention of aggregation of a monomeric protein in vivo comprising: (a) constructing a host cell transformed with (i) a first DNA encoding a polypeptide having the amino acid sequence of a bioactive protein or a precursor thereof, wherein said polypeptide or precursor can aggregate within the cell to result in a multimeric, non-bioactive protein or precursor thereof and (ii) a second DNA which enable the cell to co-express the protein of the invention or part thereof with the said polypeptide or precursor, (b) growing said host cell for sufficient time under conditions wherein said first DNA and said second DNA express said bioactive protein and said protein of the invention, respectively; and (c) obtaining monomeric protein that is a bioactive protein. Alternatively the protein of SEQ ID NO:303 or fragments thereof may be exogeneously added to the cell cultures as described in PCT application WO 00/08135, the disclosure of which is incorporated herein by reference in its entirety.

[0831] The protein of SEQ ID NO:303 or fragments thereof may further be used to regenerate denatured proteins. Recombinantly expressed proteins with poor biological activity are routinely denatured with a potent denaturing agent, such as guanidine hydrochloride, followed by refolding by dilution with a large amount of a diluent to reduce the concentration of the denaturing agent. However, this method often results in a poor refolding rate which may be significantly increased by addition of a cocktail of chaperone proteins in a fashion similar to that described in Eur. Patent EP0650975, the disclosure of which is incorporated herein by reference in its entirety. The advantage of using a cocktail of chaperone proteins is to accommodate differences in binding specificity of the Hsp different families and the different members within each family.

[0832] In another embodiment of the present invention, the protein of SEQ ID NO:303 may be used to promote tissue repair and/or increase cell survival in stress conditions such as hypoxy, oxidative stress, genotoxic agents and more generally harmful conditions leading to programmed cell death. Those conditions include but are not limited to infarction, heart surgery, stroke, neurodegenerative diseases, epilepsy, trauma, atherosclerosis, restenosis after angioplasty, and nerve damage.

[0833] In addition, the invention relates to compositions and methods for promoting cell growth both in vitro and in vivo using any of the techniques known to those skilled in the art including those described in the U.S. Pat. No. 6,117,421. For example, soluble forms of the protein of the invention or part thereof may be added to cell culture medium in an amount effective to stimulate cell proliferation. Alternatively, any of the gene therapy methods described herein may be used to overexpress the protein of the invention or part thereof in vivo. Alternatively, the protein of the invention or part thereof may be directly administered in an amount effective to promoting cell growth in said subject. These applications are particularly important in individuals suffering from wounds or tissue damage to enhance tissue repair, in individuals to which organ or skin grafts have been applied, in individuals suffering from an inflammatory condition or an allergic disease.

[0834] In addition, the invention relates to compositions and methods for promoting immunosupression in a subject using any of the techniques known to those skilled in the art including those described in the U.S. Pat. No. 6,117,421. For example, the protein of the invention or part thereof may be directly administered in an amount effective to achieve immunosupression in said subject. Alternatively, any of the gene therapy methods described herein may be used to overexpress the protein of the invention or part thereof in vivo. These applications are particularly important in cases in which immunosupression is desired such as in individuals suffering from autoimmune disease including any of the diseases cited above and in individuals that have received an heterologous graft they could reject.

Ion Transport Protein of SEQ ID NO: 276 (Internal Designation D538694)

[0835] The protein of SEQ ID NO: 276 encoded by the cDNA of SEQ ID NO:107 belongs to the FXDY family of small ion transport regulators or channels (Sweadner and Rael (2000) Genomics 68:41-56, which disclosure is hereby incorporated by reference in its entirety). The protein of SEQ ID NO: 276 or part thereof plays a role in the control of ion transport. Preferred polypeptides of the invention are polypeptides comprising the amino acids of SEQ ID NO:276 from positions 9 to 63, or from positions 16 to 29. Other preferred polypeptides of the invention are fragments of SEQ ID NO: 276 having any of the biological activities described herein. The activity of the protein of the invention or part thereof may be assayed using any of the assays known to those skilled in the art including those described in .

[0836] Osmoregulation occurs in all organisms, though the mechanisms differ according to the organism's environment. Fresh water inhabitants need to retain salts, whereas ocean inhabitants need to retain water. Terrestrial inhabitants need to conserve both water and salts. Organisms must balance these needs with a requirement to eliminate metabolic waste, such as nitrogenous waste, and generate secreted body fluids, such as saliva for digestion and sweat for thermoregulation.

[0837] In mammals, sweat glands, salivary glands, and the kidney all produce a primary secretion that is essentially isosmotic with blood and extracellular fluids. Modification of this primary secretion then occurs as much of the sodium chloride and water are reabsorbed as they pass through the excretory ducts of the glands and kidney, whereas potassium and bicarbonate ions are secreted. This modification of the primary secretion is important in the sweat glands to conserve sodium chloride in hot environments, and in the salivary glands to conserve sodium chloride when excessive quantities of saliva are lost. This modification is critical in the kidney to maintain proper sodium and water balance in the extracellular fluids, a balance which also regulates arterial pressure. Loss of this modification activity by the duct cells causes a large loss of sodium and water, resulting in severe dehydration and low blood volume, and ultimately to circulatory collapse.

[0838] Sodium absorption by the intestines, especially in the colon, is necessary to prevent loss of sodium in the stools. The loss of sodium absorption produces a failure to absorb anions and water as well. The unabsorbed sodium chloride and water then lead to diarrhea, with further loss of sodium chloride from the body. Other body fluids may be under regulation similar to that seen in the systems described above. For example, cerebrospinal fluid is produced by active sodium ion transport from the capillaries across the epithelium of the choroid plexus, which in turn attracts chloride ions and water. A counter flow of potassium and bicarbonate ions move out of the cerebrospinal fluid into the capillaries. A dysfunction in osmoregulation is associated with several disease states, including hyponatremia, renal failure, and hypernatremia. (Strange, K. (1992) J Am. Soc. Nephrol. 3:12-27, which disclosure is hereby incorporated by reference in its entirety).

[0839] In one embodiment, the protein of the invention may be useful in the diagnosis, prevention and/or treatment of osmoregulatory disorders including but not limited to diabetes insipidus, diarrhea, peritonitis, chronic renal failure, Addison's disease, syndrome of inappropriate antidiuretic hormone (SIADH), hypoaldosteronism, hyponatremia, adrenal insufficiency, hypothyroidism, hypernatremia, hypokalemia, Barter's syndrome, Cushing's syndrome, metabolic acidosis, metabolic alkalosis, encephalopathy, edema, hypotension, and hypertension. For example, any of the gene therapy methods described herein may be used to overexpress the protein of the invention or part thereof in vivo. Alternatively, the protein of the invention or part thereof may be directly administered in an amount effective to promoting cell growth in said subject. For diagnostic purposes, the expression of the protein of the invention could be investigated using any of the Northern blotting, RT-PCR or immunoblotting methods described herein and compared to the expression in control individuals. For prevention and/or treatment purposes, the protein of the invention may be used to enhance ion transport and prevent or treat osmoregulatory disorders using any of the gene therapy methods described herein.

Uses of Antibodies

[0840] Antibodies of the present invention have uses that include, but are not limited to, methods known in the art to purify, detect, and target the polypeptides of the present invention including both in vitro and in vivo diagnostic and therapeutic methods. An example of such use using immunoaffinity chromatography is given below. The antibodies of the present invention may be used either alone or in combination with other compositions. For example, the antibodies have use in immunoassays for qualitatively and quantitatively measuring levels of antigen-bearing substances, including the polypeptides of the present invention, in biological samples (See, e.g., Harlow et al., 1988). (Incorporated by reference in the entirety). The antibodies may also be used in therapeutic compositions for killing cells expressing the protein or reducing the levels of the protein in the body.

[0841] The invention further relates to antibodies that act as agonists or antagonists of the polypeptides of the present invention. For example, the present invention includes antibodies that disrupt the receptor/ligand interactions with the polypeptides of the invention either partially or fully. Included are both receptor-specific antibodies and ligand-specific antibodies. Included are receptor-specific antibodies, which do not prevent ligand binding but prevent receptor activation. Receptor activation (i.e., signaling) may be determined by techniques described herein or otherwise known in the art. Also include are receptor-specific antibodies which both prevent ligand binding and receptor activation. Likewise, included are neutralizing antibodies that bind the ligand and prevent binding of the ligand to the receptor, as well as antibodies that bind the ligand, thereby preventing receptor activation, but do not prevent the ligand from binding the receptor. Further included are antibodies that activate the receptor. These antibodies may act as agonists for either all or less than all of the biological activities affected by ligand-mediated receptor activation. The antibodies may be specified as agonists or antagonists for biological activities comprising specific activities disclosed herein. The above antibody agonists can be made using methods known in the art. See e.g., WO 96/40281; U.S. Pat. No. 5,811,097; Deng et al. (1998); Chen et al. (1998); Harrop et al. (1998); Zhu et al. (1998); Yoon et al. (1998); Prat et al. (1998); Pitard et al. (1997); Liautard et al. (1997); Carlson et al. (1997); Taryman et al. (1995); Muller et al. (1998); Bartunek et al. (1996) (said references incorporated by reference in their entireties).

[0842] As discussed above, antibodies of the polypeptides of the invention can, in turn, be utilized to generate anti-idiotypic antibodies that “mimic” polypeptides of the invention using techniques well known to those skilled in the art (See, e.g. Greenspan and Bona (1989) and Nissinoff (1991), which disclosures are hereby incorporated by reference in their entireties). For example, antibodies which bind to and competitively inhibit polypeptide multimerization or binding of a polypeptide of the invention to ligand can be used to generate anti-idiotypes that “mimic” the polypeptide multimerization or binding domain and, as a consequence, bind to and neutralize polypeptide or its ligand. Such neutralization anti-idiotypic antibodies can be used to bind a polypeptide of the invention or to bind its ligands/receptors, and thereby block its biological activity.

Immunoaffinity Chromatography

[0843] Antibodies prepared as described herein are coupled to a support. Preferably, the antibodies are monoclonal antibodies, but polyclonal antibodies may also be used. The support may be any of those typically employed in immunoaffinity chromatography, including Sepharose CL-4B (Pharmacia, Piscataway, N.J.), Sepharose CL-2B (Pharmacia, Piscataway, N.J.), Affi-gel 10 (Biorad, Richmond, Calif.), or glass beads.

[0844] The antibodies may be coupled to the support using any of the coupling reagents typically used in immunoaffinity chromatography, including cyanogen bromide. After coupling the antibody to the support, the support is contacted with a sample which contains a target polypeptide whose isolation, purification or enrichment is desired. The target polypeptide may be a polypeptide selected from the group consisting of sequences of SEQ ID NOs:170-338, 456-560, 785-918 and polypeptides encoded by the clone inserts of the deposited clone pool, variants and fragments thereof, or a fusion protein comprising said selected polypeptide or a fragment thereof.

[0845] Preferably, the sample is placed in contact with the support for a sufficient amount of time and under appropriate conditions to allow at least 50% of the target polypeptide to specifically bind to the antibody coupled to the support.

[0846] Thereafter, the support is washed with an appropriate wash solution to remove polypeptides which have non-specifically adhered to the support. The wash solution may be any of those typically employed in immunoaffinity chromatography, including PBS, Tris-lithium chloride buffer (0.1M lysine base and 0.5M lithium chloride, pH 8.0), Tris-hydrochloride buffer (0.05M Tris-hydrochloride, pH 8.0), or Tris/Triton/NaCl buffer (50 mM Tris.cl, pH 8.0 or 9.0, 0.1% Triton X-100, and 0.5 MNaCl).

[0847] After washing, the specifically bound target polypeptide is eluted from the support using the high pH or low pH elution solutions typically employed in immunoaffinity chromatography. In particular, the elution solutions may contain an eluant such as triethanolamine, diethylamine, calcium chloride, sodium thiocyanate, potasssium bromide, acetic acid, or glycine. In some embodiments, the elution solution may also contain a detergent such as Triton X-100 or octyl-beta-D-glucoside.

### Expression of Genset Gene Products

Spatial Expression of the GENSET Genes of the Invention

[0848] Tissue expression of the cDNAs of the present invention was examined. Tables III and IV lists the number of hits for the cDNAs in Genset's libraries of tissues and cell types as well as in public databases. The tissues and cell types examined for polynucleotide expression were, for Table III: Brain; Fetal brain; Fetal kidney; Fetal liver; Pituitary gland; Liver; Placenta; Prostate; Salivary gland; Stomach/Intestine; and Testis. For each cDNA referred to by its corresponding sequence identification number from the priority application (see Table I for corresponding SEQ ID NO in present application), the number of proprietary 5′ESTs (i.e. cDNA fragments) expressed in a particular tissue referred to by its name is indicated in parentheses (second column). In addition, the bias in the spatial distribution of the polynucleotide sequences of the present invention was examined by comparing the relative proportions of the biological polynucleotides of a given tissue using the following statistical analysis. The under- or over-representation of a polynucleotide of a given cluster in a given tissue was performed using the normal approximation of the binomial distribution. When the observed proportion of a polynucleotide of a given tissue in a given consensus had less than 1% chance to occur randomly according to the chi2 test, the frequency bias was reported as “preferred”. The results are given in Table V as follows. For each polynucleotide showing a bias in tissue distribution as referred to by its sequence identification number in the first column, the list of tissues where the polynucleotides are under-represented is given in the second column entitled “low expression” and the list of tissues where the polynucleotides are over-represented is given in the third column entitled “high expression”.

Evaluation of Expression Levels and Patterns of GENSET Polypeptide-Encoding mRNAs

[0849] The spatial and temporal expression patterns of GENSET polypeptide-encoding mRNAs, as well as their expression levels, may also be further determined as follows.

[0850] Expression levels and patterns of GENSET polypeptide-encoding mRNAs may be analyzed by solution hybridization with long probes as described in International Patent Application No. WO 97/05277, the entire contents of which are hereby incorporated by reference. Briefly, a GENSET polynucleotide, or fragment thereof, corresponding to the gene encoding the mRNA to be characterized is inserted at a cloning site immediately downstream of a bacteriophage (T3, T7 or SP6) RNA polymerase promoter to produce antisense RNA. Preferably, the GENSET polynucleotide is at least a 100 nucleotides in length. The plasmid is linearized and transcribed in the presence of ribonucleotides comprising modified ribonucleotides (i.e. biotin-UTP and DIG-UTP). An excess of this doubly labeled RNA is hybridized in solution with mRNA isolated from cells or tissues of interest. The hybridizations are performed under standard stringent conditions (40-50° C. for 16 hours in an 80% formamide, 0.4 M NaCl buffer, pH 7-8). The unhybridized probe is removed by digestion with ribonucleases specific for single-stranded RNA (i.e. RNases CL3, T1, Phy M, U2 or A). The presence of the biotin-UTP modification enables capture of the hybrid on a microtitration plate coated with streptavidin. The presence of the DIG modification enables the hybrid to be detected and quantified by ELISA using an anti-DIG antibody coupled to alkaline phosphatase.

[0851] The GENSET polypeptide-encoding cDNAs, or fragments thereof, may also be tagged with nucleotide sequences for the serial analysis of gene expression (SAGE) as disclosed in UK Patent Application No. 2 305 241 A, the entire contents of which are incorporated by reference. In this method, cDNAs are prepared from a cell, tissue, organism or other source of nucleic acid for which it is desired to determine gene expression patterns. The resulting cDNAs are separated into two pools. The cDNAs in each pool are cleaved with a first restriction endonuclease, called an “anchoring enzyme,” having a recognition site which is likely to be present at least once in most cDNAs. The fragments which contain the 5′ or 3′ most region of the cleaved cDNA are isolated by binding to a capture medium such as streptavidin coated beads. A first oligonucleotide linker having a first sequence for hybridization of an amplification primer and an internal restriction site for a “tagging endonuclease” is ligated to the digested cDNAs in the first pool. Digestion with the second endonuclease produces short “tag” fragments from the cDNAs. A second oligonucleotide having a second sequence for hybridization of an amplification primer and an internal restriction site is ligated to the digested cDNAs in the second pool. The cDNA fragments in the second pool are also digested with the “tagging endonuclease” to generate short “tag” fragments derived from the cDNAs in the second pool. The “tags” resulting from digestion of the first and second pools with the anchoring enzyme and the tagging endonuclease are ligated to one another to produce “ditags.” In some embodiments, the ditags are concatamerized to produce ligation products containing from 2 to 200 ditags. The tag sequences are then determined and compared to the sequences of the GENSET polypeptide-encoding cDNAs to determine which genes are expressed in the cell, tissue, organism, or other source of nucleic acids from which the tags were derived. In this way, the expression pattern of a GENSET polypeptide-encoding gene in the cell, tissue, organism, or other source of nucleic acids is obtained.

[0852] Quantitative analysis of GENSET gene expression may also be performed using arrays. For example, quantitative analysis of gene expression may be performed with GENSET polynucleotides, or fragments thereof in a complementary DNA microarray as described by Schena et al. (1995 and 1996) which disclosures are hereby incorporated by reference in their entireties. GENSET polypeptide-encoding cDNAs or fragments thereof are amplified by PCR and arrayed from 96-well microtiter plates onto silylated microscope slides using high-speed robotics. Printed arrays are incubated in a humid chamber to allow rehydration of the array elements and rinsed, once in 0.2% SDS for 1 min, twice in water for 1 min and once for 5 min in sodium borohydride solution. The arrays are submerged in water for 2 min at 95° C., transferred into 0.2% SDS for 1 min, rinsed twice with water, air dried and stored in the dark at 25° C. Cell or tissue mRNA is isolated or commercially obtained and probes are prepared by a single round of reverse transcription. Probes are hybridized to 1 cm² microarrays under a 14×14 mm glass coverslip for 6-12 hours at 60° C. Arrays are washed for 5 min at 25° C. in low stringency wash buffer (1×SSC/0.2% SDS), then for 10 min at room temperature in high stringency wash buffer (0.1×SSC/0.2% SDS). Arrays are scanned in 0.1×SSC using a fluorescence laser scanning device fitted with a custom filter set. Accurate differential expression measurements are obtained by taking the average of the ratios of two independent hybridizations.

[0853] Quantitative analysis of the expression of genes may also be performed with GENSET polypeptide-encoding cDNAs or fragments thereof in complementary DNA arrays as described by Pietu et al. (1996), which disclosure is hereby incorporated by reference in its entirety. The GENSET polynucleotides of the invention or fragments thereof are PCR amplified and spotted on membranes. Then, mRNAs originating from various tissues or cells are labeled with radioactive nucleotides. After hybridization and washing in controlled conditions, the hybridized mRNAs are detected by phospho-imaging or autoradiography. Duplicate experiments are performed and a quantitative analysis of differentially expressed mRNAs is then performed.

[0854] Alternatively, expression analysis of GENSET genes can be done through high density nucleotide arrays as described by Lockhart et al. (1996) and Sosnowski et al. (1997), which disclosures are hereby incorporated by reference in their entireties. Oligonucleotides of 15-50 nucleotides corresponding to sequences of a GENSET polynucleotide or fragments thereof are synthesized directly on the chip (Lockhart et al., supra) or synthesized and then addressed to the chip (Sosnowski et al., supra). Preferably, the oligonucleotides are about 20 nucleotides in length. cDNA probes labeled with an appropriate compound, such as biotin, digoxigenin or fluorescent dye, are synthesized from the appropriate mRNA population and then randomly fragmented to an average size of 50 to 100 nucleotides. The said probes are then hybridized to the chip. After washing as described in Lockhart et al., (supra) and application of different electric fields (Sosnowsky et al., supra), the dyes or labeling compounds are detected and quantified. Duplicate hybridizations are performed. Comparative analysis of the intensity of the signal originating from cDNA probes on the same target oligonucleotide in different cDNA samples indicates a differential expression of the GENSET polypeptide-encoding mRNA.

Uses of GENSET Gene Expression Data

[0855] Once the expression levels and patterns of a GENSET polypeptide-encoding mRNA has been determined using any technique known to those skilled in the art, in particular those described in the section entitled “Evaluation of Expression Levels and Patterns of GENSET polypeptide-encoding mRNAs”, or using the instant disclosure, these information may be used to design GENSET gene specific markers for detection, identification, screening and diagnosis purposes as well as to design DNA constructs with an expression pattern similar to a GENSET gene expression pattern.

Detection of GENSET Polypeptide Expression and/or Biological Activity

[0856] The invention further relates to methods of detection of GENSET polypeptide expression and/or biological activity in a biological sample using the polynucleotide and polypeptide sequences described herein. Such method scan be used, for example, as a screen for normal or abnormal GENSET polypeptide expression and/or biological activity and, thus, can be used diagnostically. The biological sample for use in the methods of the present invention includes a suitable sample from, for example, a mammal, particularly a human. For example, the sample can be issued from tissues or cell lines having the same origin as tissues or cell lines in which the polypeptide is known to be expressed, e.g. using data from Tables III, IV, or V.

Detection of GENSET Polypeptides

[0857] The invention further relates to methods of detection of GENSET polypeptide or encoding polynucleotides in a sample using the sequences described herein and any techniques known to those skilled in the art. For example, a labeled polynucleotide probe having all or a functional portion of the nucleotide sequence of a GENSET polypeptide-encoding polynucleotide can be used in a method to detect a GENSET polypeptide-encoding polynucleotide in a sample. In one embodiment, the sample is treated to render the polynucleotides in the sample available for hybridization to a polynucleotide probe, which can be DNA or RNA. The resulting treated sample is combined with a labeled polynucleotide probe having all or a portion of the nucleotide sequence of the GENSET polypeptide-encoding cDNA or genomic sequence, under conditions appropriate for hybridization of complementary sequences to occur. Detection of hybridization of polynucleotides from the sample with the labeled nucleic probe indicates the presence of GENSET polypeptide-encoding polynucleotides in a sample. The presence of GENSET polypeptide-encoding mRNA is indicative of GENSET polypeptide-encoding gene expression.

[0858] Consequently, the invention comprises methods for detecting the presence of a polynucleotide comprising a nucleotide sequence selected from a group consisting of the sequences of SEQ ID NOs:1-169, 339-455, 561-784, the sequences of clone inserts of the deposited clone pool, sequences fully complementary thereto, fragments and variants thereof in a sample. In a first embodiment, said method comprises the following steps of:

[0859] a) bringing into contact said sample and a nucleic acid probe or a plurality of nucleic acid probes which hybridize to said selected nucleotide sequence; and

[0860] b) detecting the hybrid complex formed between said probe or said plurality of probes and said polynucleotide.

[0861] In a preferred embodiment of the above detection method, said nucleic acid probe or said plurality of nucleic acid probes is labeled with a detectable molecule. In another preferred embodiment of the above detection method, said nucleic acid probe or said plurality of nucleic acid probes has been immobilized on a substrate. In still another preferred embodiment, said nucleic acid probe or said plurality of nucleic acid probes has a sequence comprised in a sequence complementary to said selected sequence.

[0862] In a second embodiment, said method comprises the steps of:

[0863] a) contacting said sample with amplification reaction reagents comprising a pair of amplification primers located on either side of the region of said nucleotide sequence to be amplified;

[0864] b) performing an amplification reaction to synthesize amplification products containing said region of said selected nucleotide sequence; and

[0865] c) detecting said amplification products.

[0866] In a preferred embodiment of the above detection method, when the polynucleotide to be amplified is a RNA molecule, preliminary reverse transcription and synthesis of a second cDNA strand are necessary to provide a DNA template to be amplified. In another preferred embodiment of the above detection method, the amplification product is detected by hybridization with a labeled probe having a sequence which is complementary to the amplified region. In still another preferred embodiment, at least one of said amplification primer has a sequence comprised in said selected sequence or in the sequence complementary to said selected sequence.

[0867] Alternatively, a method of detecting GENSET polypeptide expression in a test sample can be accomplished using any product which binds to a GENSET olypeptide of the present invention or a portion of a GENSET polypeptide. Such products may be antibodies, binding fragments of antibodies, polypeptides able to bind specifically to GENSET polypeptides or fragments thereof, including GENSET polypeptide agonists and antagonists. Detection of specific binding to the antibody indicates the presence of a GENSET polypeptide in the sample (e.g., ELISA).

[0868] Consequently, the invention is also directed to a method for detecting specifically the presence of a GENSET polypeptide according to the invention in a biological sample, said method comprising the steps of:

[0869] a) bringing into contact said biological sample with a product able to bind to a polypeptide of the invention or fragments thereof;

[0870] b) allowing said product to bind to said polypeptide to form a complex; and

[0871] b) detecting said complex.

[0872] In a preferred embodiment of the above detection method, the product is an antibody. In a more preferred embodiment, said antibody is labeled with a detectable molecule. In another more preferred embodiment of the above detection method, said antibody has been immobilized on a substrate.

[0873] In addition, the invention also relates to methods of determining whether a GENSET gene product (e.g. a polynucleotide or polypeptide) is present or absent in a biological sample, said methods comprising the steps of:

[0874] a) obtaining said biological sample from a human or non-human animal, preferably a mammal;

[0875] b) contacting said biological sample with a product able to bind to a GENSET polypeptide or encoding polynucleotide of the invention; and

[0876] c) determining the presence or absence of said GENSET polypeptide-encoding gene product in said biological sample.

[0877] The present invention also relates to kits that can be used in the detection of GENSET polypeptide-encoding gene expression products. The kit can comprise a compound that specifically binds a GENSET polypeptide (e.g. binding proteins, antibodies or binding fragments thereof (e.g. F(ab′)2 fragments) or a GENSET polypeptide-encoding mRNA (e.g. a complementary probe or primer), for example, disposed within a container means. The kit can further comprise ancillary reagents, including buffers and the like.

Detection of GENSET Polypeptide Biological Activity

[0878] The invention further includes methods of detecting specifically a GENSET polypeptide biological activity, and to identify compounds capable of modulating the activity of a GENSET polypeptide. Assessing the GENSET polypeptide biological activity may be performed by the detection of a change in any cellular property associated with the GENSET polypeptide, using a variety of techniques, including those described herein. To identify modulators of the polypeptides, a control is preferably used. For example, a control sample includes all of the same reagents but lacks the compound or agent being assessed; it is treated in the same manner as the test sample. A number of potentially assayable biological activities for many of the herein-described proteins are described supra, under the heading, “Uses of polypeptides of the invention.”

[0879] The present invention also relates to kits that can be used in the detection of GENSET polypeptide biological activity. The kit can comprise, e.g. substrates for GENSET polypeptides, GENSET-binding compounds, antibodies to GENSET polypeptides, etc., for example, disposed within a container means. The kit can further comprise ancillary reagents, including buffers and the like.

Identification of a Specific Context of GENSET Polypeptide-Encoding Gene Expression

[0880] When the expression pattern of a GENSET polypeptide-encoding mRNA shows that a GENSET polypeptide-encoding gene is specifically expressed in a given context, probes and primers specific for this gene as well as antibodies binding to the GENSET polypeptide-encoding polynucleotide may then be used as markers for the specific context. Examples of specific contexts are: specific expression in a given tissue/cell or tissue/cell type (see, e.g., Tables III-V), expression at a given stage of development of a process such as embryo development or disease development, or specific expression in a given organelle. Such primers, probes, and antibodies are useful commercially to identify tissues/cells/organelles of unknown origin, for example, forensic samples, differentiated tumor tissue that has metastasized to foreign bodily sites, or to differentiate different tissue types in a tissue cross-section using any technique known to those skilled in the art including in situ PCR or immunochemistry for example.

[0881] For example, the cDNAs and proteins of the sequence listing and fragments thereof, may be used to distinguish human tissues/cells from non-human tissues/cells and to distinguish between human tissues/cells/organelles that do and do not express the polynucleotides comprising the cDNAs. By knowing the expression pattern of a given GENSET polypeptide, either through routine experimentation or by using the instant disclosure, the polynucleotides and polypeptides of the present invention may be used in methods of determining the identity of an unknown tissue/cell sample/organelle. As part of determining the identity of an unknown tissue/cell sample/organelle, the polynucleotides and polypeptides of the present invention may be used to determine what the unknown tissue/cell sample is and what the unknown sample is not. For example, if a cDNA is expressed in a particular tissue/cell type/organelle, and the unknown tissue/cell sample/organelle does not express the cDNA, it may be inferred that the unknown tissue/cells are either not human or not the same human tissue/cell type/organelle as that which expresses the cDNA. These methods of determining tissue/cell/organelle identity are based on methods which detect the presence or absence of the mRNA (or corresponding cDNA) in a tissue/cell sample using methods well know in the art (e.g., hybridization, PCR based methods, immunoassays, immunochemistry, ELISA). Examples of such techniques are described in more detail below. Therefore, the invention encompasses uses of the polynucleotides and polypeptides of the invention as tissue markers. In a preferred embodiment, polynucleotides preferentially expressed in given tissues as indicated in Tables III-V and polypeptides encoded by such polynucleotides are used for this purpose. The invention also encompasses uses of polypeptides of the invention as organelle markers.

[0882] Consequently, the present invention encompasses methods of identification of a tissue/cell type/subcellular compartment, wherein said method includes the steps of:

[0883] a) contacting a biological sample which identity is to be assayed with a product able to bind a GENSET gene product; and

[0884] b) determining whether a GENSET gene product is expressed in said biological sample.

[0885] Products that are able to bind specifically to a GENSET gene product, namely a GENSET polypeptide or a GENSET polypeptide-encoding mRNA, include GENSET polypeptide binding proteins, antibodies or binding fragments thereof (e.g. F(ab′)2 fragments), as well as GENSET polynucleotide complementary probes and primers.

[0886] Step b) may be performed using any detection method known to those skilled in the art including those disclosed herein, especially in the section entitled “Detection of GENSET polypeptide expression and/or biological activity”.

Identification of Tissue Types or Cell Species by Means of Labeled Tissue Specific Antibodies

[0887] Identification of specific tissues is accomplished by the visualization of tissue specific antigens by means of antibody preparations which are conjugated, directly (e.g., green fluorescent protein) or indirectly to a detectable marker. Selected labeled antibody species bind to their specific antigen binding partner in tissue sections, cell suspensions, or in extracts of soluble proteins from a tissue sample to provide a pattern for qualitative or semi-qualitative interpretation.

[0888] Antisera for these procedures must have a potency exceeding that of the native preparation, and for that reason, antibodies are concentrated to a mg/ml level by isolation of the gamma globulin fraction, for example, by ion-exchange chromatography or by ammonium sulfate fractionation. Also, to provide the most specific antisera, unwanted antibodies, for example to common proteins, must be removed from the gamma globulin fraction, for example by means of insoluble immunoabsorbents, before the antibodies are labeled with the marker. Either monoclonal or heterologous antisera is suitable for either procedure.

A. Immunohistochemical Techniques

[0889] Purified, high-titer antibodies, prepared as described above, are conjugated to a detectable marker, as described, for example, by Fudenberg, (1980) or Rose et al., (1980), which disclosures are hereby incorporated by reference in their entireties.

[0890] A fluorescent marker, either fluorescein or rhodamine, is preferred, but antibodies can also be labeled with an enzyme that supports a color producing reaction with a substrate, such as horseradish peroxidase. Markers can be added to tissue-bound antibody in a second step, as described below. Alternatively, the specific anti-tissue antibodies can be labeled with ferritin or other electron dense particles, and localization of the ferritin coupled antigen-antibody complexes achieved by means of an electron microscope. In yet another approach, the antibodies are radiolabeled, with, for example ¹²⁵I, and detected by overlaying the antibody treated preparation with photographic emulsion. Preparations to carry out the procedures can comprise monoclonal or polyclonal antibodies to a single protein or peptide identified as specific to a tissue type, for example, brain tissue, or antibody preparations to several antigenically distinct tissue specific antigens can be used in panels, independently or in mixtures, as required. Tissue sections and cell suspensions are prepared for immunohistochemical examination according to common histological techniques. Multiple cryostat sections (about 4 um, unfixed) of the unknown tissue and known control, are mounted and each slide covered with different dilutions of the antibody preparation. Sections of known and unknown tissues should also be treated with preparations to provide a positive control, a negative control, for example, pre-immune sera, and a control for non-specific staining, for example, buffer. Treated sections are incubated in a humid chamber for 30 min at room temperature, rinsed, then washed in buffer for 30-45 min. Excess fluid is blotted away, and the marker developed. If the tissue specific antibody was not labeled in the first incubation, it can be labeled at this time in a second antibody-antibody reaction, for example, by adding fluorescein- or enzyme-conjugated antibody against the immunoglobulin class of the antiserum-producing species, for example, fluorescein labeled antibody to mouse IgG. Such labeled sera are commercially available. The antigen found in the tissues by the above procedure can be quantified by measuring the intensity of color or fluorescence on the tissue section, and calibrating that signal using appropriate standards.

B. Identification of Tissue Specific Soluble Proteins

[0891] The visualization of tissue specific proteins and identification of unknown tissues from that procedure is carried out using the labeled antibody reagents and detection strategy as described for immunohistochemistry; however the sample is prepared according to an electrophoretic technique to distribute the proteins extracted from the tissue in an orderly array on the basis of molecular weight for detection. A tissue sample is homogenized using a Virtis apparatus; cell suspensions are disrupted by Dounce homogenization or osmotic lysis, using detergents in either case as required to disrupt cell membranes, as is the practice in the art. Insoluble cell components such as nuclei, microsomes, and membrane fragments are removed by ultracentrifugation, and the soluble protein-containing fraction concentrated if necessary and reserved for analysis. A sample of the soluble protein solution is resolved into individual protein species by conventional SDS polyacrylamide electrophoresis as described, for example, by Davis et al., Section 19-2 (1986), using a range of amounts of polyacrylamide in a set of gels to resolve the entire molecular weight range of proteins to be detected in the sample. A size marker is run in parallel for purposes of estimating molecular weights of the constituent proteins. Sample size for analysis is a convenient volume of from 5 to 55 ul, and containing from about 1 to 100 ug protein. An aliquot of each of the resolved proteins is transferred by blotting to a nitrocellulose filter paper, a process that maintains the pattern of resolution. Multiple copies are prepared. The procedure, known as Western Blot Analysis, is well described in Davis et al., (1986) Section 19-3. One set of nitrocellulose blots is stained with Coomassie Blue dye to visualize the entire set of proteins for comparison with the antibody bound proteins. The remaining nitrocellulose filters are then incubated with a solution of one or more specific antisera to tissue specific proteins prepared as described herein. In this procedure, as in procedure A above, appropriate positive and negative sample and reagent controls are run.

[0892] In either procedure A or B, a detectable label can be attached to the primary tissue antigen-primary antibody complex according to various strategies and permutations thereof. In a straightforward approach, the primary specific antibody can be labeled; alternatively, the unlabeled complex can be bound by a labeled secondary anti-IgG antibody. In other approaches, either the primary or secondary antibody is conjugated to a biotin molecule, which can, in a subsequent step, bind an avidin conjugated marker. According to yet another strategy, enzyme labeled or radioactive protein A, which has the property of binding to any IgG, is bound in a final step to either the primary or secondary antibody. The visualization of tissue specific antigen binding at levels above those seen in control tissues to one or more tissue specific antibodies, prepared from the gene sequences identified from cDNA sequences, can identify tissues of unknown origin, for example, forensic samples, or differentiated tumor tissue that has metastasized to foreign bodily sites.

Screening and Diagnosis of Abnormal GENSET Polypeptide Expression and/or Biological Activity

[0893] Moreover, antibodies and/or primers specific for GENSET polypeptide expression may also be used to identify abnormal GENSET polypeptide expression and/or biological activity, and subsequently to screen and/or diagnose disorders associated with abnormal GENSET polypeptide expression. For example, a particular disease may result from lack of expression, over expression, or under expression of a GENSET polypeptide-encoding mRNA. By comparing mRNA expression patterns and quantities in samples taken from healthy individuals with those from individuals suffering from a particular disorder, genes responsible for this disorder may be identified. Primers, probes and antibodies specific for this GENSET polypeptide may then be used to elaborate kits of screening and diagnosis for a disorder in which the gene of interest is specifically expressed or in which its expression is specifically dysregulated, i.e. underexpressed or overexpressed.

Screening for Specific Disorders

[0894] The present invention also relates to methods and uses of GENSET polypeptides for identifying individuals having elevated or reduced levels of GENSET polypeptides, which individuals are likely to benefit from therapies to suppress or enhance GENSET polypeptide-encoding gene expression, respectively. One example of such methods and uses comprises the steps of:

[0895] a) obtaining from a mammal a biological sample;

[0896] b) detecting the presence in said sample of a GENSET polypeptide-encoding gene product (mRNA or protein);

[0897] c) comparing the amount of said GENSET polypeptide-encoding gene product present in said sample with that of a control sample; and

[0898] d) determing whether said human or non-human mammal has a reduced or elevated level of GENSET gene expression compared to the control sample.

[0899] A biological sample from a subject affected by, or at risk of developing, any disease or condition associated with a GENSET polypeptide can be screened for the presence of increased or decreased levels of GENSET gene product, relative to a normal population (standard or control), with an increased or decreased level of the GENSET polypeptide relative to the normal population being indicative of predisposition to or a present indication of the disease or condition, or any sympton associated with the disease or condition. Such individuals would be candidates for therapies, e.g., treatment with pharmaceutical compositions comprising the GENSET polypeptide, a polynucleotide encoding the GENSET polypeptide, or any other compound that affects the expression or activity of the GENSET polypeptide. Generally, the identification of elevated levels of the GENSET polypeptide in a patient would be indicative of an individual that would benefit from treatment with agents that suppress GENSET polypeptide expression or activity, and the identification of low levels of the GENSET polypeptide in a patient would be indicative of an individual that would benefit from agents that induce GENSET expression or activity.

[0900] Biological samples suitable for use in this method include any biological fluids, including, but not limited to, blood, saliva, milk, and urine. Tissue samples (e.g. biopsies) can also be used in the method of the invention, including samples derived from any tissue associated with GENSET gene expression (see, e.g. Tables III-V). Cell cultures or cell extracts derived, for example, from tissue biopsies can also be used. The detection step of the present method can be performed using standard protocols for protein/mRNA detection. Examples of suitable protocols include Northern blot analysis, immunoassays (e.g. RIA, Western blots, immunohistochemical analyses), and PCR.

[0901] Thus, the present invention further relates to methods and uses of GENSET polypeptides for identifying individuals or non-human animals at increased risk for developing, or present state of having, certain diseases/disorders associated with abnormal GENSET polypeptide expression or biological activity. One example of such methods comprises the steps of:

[0902] a) obtaining from a human or non-human mammal a biological sample;

[0903] b) detecting the presence in said sample of a GENSET gene product (mRNA or protein);

[0904] c) comparing the amount of said GENSET gene product present in said sample with that of a control sample; and

[0905] d) determing whether said human or non-human mammal is at increased risk for developing, or present state of having, a diseases or disorder.

[0906] In preferred embodiments, the biological sample is taken from animals presenting any symptom associated with any disease or condition associated with a GENSET gene product. In accordance with this method, the presence in the sample of altered (e.g. increased or decreased) levels of the GENSET product indicates that the subject is predisposed to the disease or condition. Biological samples suitable for use in this method include biological fluids including, but not limited to, blood, saliva, milk, and urine. Tissue samples (e.g. biopsies) can also be used in the method of the invention, including samples derived from any of the tissues listed in Tables III-V. Cell cultures or cell extracts derived, for example, from tissue biopsies can also be used.

[0907] The diagnostic methodologies described herein are applicable to both humans and non-human mammals.

Detection of GENSET Gene Mutations

[0908] The invention also encompasses methods and uses of GENSET polynucleotides to detect mutations in GENSET polynucleotides of the invention. Such methods may advantageously be used to detect mutations occurring in GENSET genes and preferably in their regulatory regions. When the mutation was proven to be associated with a disease, the detection of such mutations may be used for screening and diagnosis purposes.

[0909] In one embodiment of the oligonucleotide arrays of the invention, an oligonucleotide probe matrix may advantageously be used to detect mutations occurring in GENSET genes and preferably in their regulatory regions. For this particular purpose, probes are specifically designed to have a nucleotide sequence allowing their hybridization to the genes that carry known mutations (either by deletion, insertion or substitution of one or several nucleotides). By known mutations, it is meant, mutations on the GENSET genes that have been identified according, for example to the technique used by Huang et al. (1996) or Samson et al. (1996), which disclosures are hereby incorporated by reference in their entireties.

[0910] Another technique that is used to detect mutations in GENSET genes is the use of a high-density DNA array. Each oligonucleotide probe constituting a unit element of the high density DNA array is designed to match a specific subsequence of a GENSET genomic DNA or cDNA. Thus, an array consisting of oligonucleotides complementary to subsequences of the target gene sequence is used to determine the identity of the target sequence with the wild gene sequence, measure its amount, and detect differences between the target sequence and the reference wild gene sequence of the GENSET gene. In one such design, termed 4 L tiled array, is implemented a set of four probes (A, C, G, T), preferably 15-nucleotide oligomers. In each set of four probes, the perfect complement will hybridize more strongly than mismatched probes. Consequently, a nucleic acid target of length L is scanned for mutations with a tiled array containing 4 L probes, the whole probe set containing all the possible mutations in the known wild reference sequence. The hybridization signals of the 15-mer probe set tiled array are perturbed by a single base change in the target sequence. As a consequence, there is a characteristic loss of signal or a “footprint” for the probes flanking a mutation position. This technique was described by Chee et al. in 1996, which disclosure is hereby incorporated by reference in its entirety.

Construction of DNA Constructs with a GENSET Gene Expression Pattern

[0911] In addition, characterization of the spatial and temporal expression patterns and expression levels of GENSET polypeptide-encoding mRNAs is also useful for constructing expression vectors capable of producing a desired level of gene product in a desired spatial or temporal manner, as discussed below.

DNA Constructs that Direct Temporal and Spatial GENSET Gene Expression in Recombinant Cell Hosts and in Transgenic Animals.

[0912] In order to study the physiological and phenotypic consequences of a lack of synthesis of a GENSET polypeptide, both at the cellular level and at the multi cellular organism level, the invention also encompasses DNA constructs and recombinant vectors enabling a conditional expression of a specific allele of a GENSET polypeptide-encoding genomic sequence or cDNA and also of a copy of this genomic sequence or cDNA harboring substitutions, deletions, or additions of one or more bases as regards to a nucleotide sequence selected from the group consisting of sequences of SEQ ID NOs:1-169, 339455, 561-784 and sequences of clone inserts of the deposited clone pool, or a fragment thereof, these base substitutions, deletions or additions being located either in an exon, an intron or a regulatory sequence, but preferably in the 5′-regulatory sequence or in an exon of the GENSET polypeptide-encoding genomic sequence or within the GENSET polypeptide-encoding cDNA.

[0913] A first preferred DNA construct is based on the tetracycline resistance operon tet from E. coli transposon Tn10 for controlling the GENSET gene expression, such as described by Gossen et al. (1992, 1995) and Furth et al. (1994), which disclosures are hereby incorporated by reference in their entireties. Such a DNA construct contains seven tet operator sequences from Tn10 (tetop) that are fused to either a minimal promoter or a 5′-regulatory sequence of the GENSET gene, said minimal promoter or said GENSET polynucleotide regulatory sequence being operably linked to a polynucleotide of interest that codes either for a sense or an antisense oligonucleotide or for a polypeptide, including a GENSET polypeptide, or a peptide fragment thereof. This DNA construct is functional as a conditional expression system for the nucleotide sequence of interest when the same cell also comprises a nucleotide sequence coding for either the wild type (tTA) or the mutant (rTA) repressor fused to the activating domain of viral protein VP16 of herpes simplex virus, placed under the control of a promoter, such as the HCMVIE1 enhancer/promoter or the MMTV-LTR. Indeed, a preferred DNA construct of the invention comprise both the polynucleotide containing the tet operator sequences and the polynucleotide containing a sequence coding for the tTA or the rTA repressor. In a specific embodiment, the conditional expression DNA construct contains the sequence encoding the mutant tetracycline repressor rTA, the expression of the polynucleotide of interest is silent in the absence of tetracycline and induced in its presence.

DNA Constructs Allowing Homologous Recombination: Replacement Vectors

[0914] A second preferred DNA construct will comprise, from 5′-end to 3′-end: (a) a first nucleotide sequence that is found in the GENSET polypeptide-encoding genomic sequence; (b) a nucleotide sequence comprising a positive selection marker, such as the marker for neomycin resistance (neo); and (c) a second nucleotide sequence that is found in the GENSET polypeptide-encoding genomic sequence, and is located on the genome downstream the first GENSET polypeptide-encoding nucleotide sequence (a).

[0915] In a preferred embodiment, this DNA construct also comprises a negative selection marker located upstream of the nucleotide sequence (a) or downstream from the nucleotide sequence (c). Preferably, the negative selection marker comprises the thymidine kinase (tk) gene (Thomas et al., 1986), the hygromycine beta gene (Te Riele et al, 1990), the hprt gene ( Van der Lugt et al., 1991; Reid et al., 1990) or the Diphteria toxin A fragment (Dt-A) gene (Nada et al., 1993; Yagi et al. 1990), which disclosures are hereby incorporated by reference in their entireties. Preferably, the positive selection marker is located within a GENSET exon sequence so as to interrupt the sequence encoding a GENSET polypeptide. These replacement vectors are described, for example, by Thomas et al. (1986; 1987), Mansour et al. (1988) and Koller et al. (1992).

[0916] The first and second nucleotide sequences (a) and (c) may be indifferently located within a GENSET polypeptide-encoding regulatory sequence, an intronic sequence, an exon sequence or a sequence containing both regulatory and/or intronic and/or exon sequences. The size of the nucleotide sequences (a) and (c) ranges from 1 to 50 kb, preferably from 1 to 10 kb, more preferably from 2 to 6 kb and most preferably from 2 to 4 kb.

DNA Constructs Allowing Homologous Recombination: Cre-LoxP System.

[0917] These new DNA constructs make use of the site specific recombination system of the P1 phage. The P1 phage possesses a recombinase called Cre which interacts specifically with a 34 base pairs loxP site. The loxP site is composed of two palindromic sequences of 13 bp separated by a 8 bp conserved sequence (Hoess et al., 1986), which disclosure is hereby incorporated by reference in its entirety. The recombination by the Cre enzyme between two loxP sites having an identical orientation leads to the deletion of the DNA fragment.

[0918] The Cre-loxP system used in combination with a homologous recombination technique has been first described by Gu et al. (1993, 1994), which disclosures are hereby incorporated by reference in their entireties. Briefly, a nucleotide sequence of interest to be inserted in a targeted location of the genome harbors at least two loxP sites in the same orientation and located at the respective ends of a nucleotide sequence to be excised from the recombinant genome. The excision event requires the presence of the recombinase (Cre) enzyme within the nucleus of the recombinant cell host. The recombinase enzyme may be brought at the desired time either by (a) incubating the recombinant cell hosts in a culture medium containing this enzyme, by injecting the Cre enzyme directly into the desired cell, such as described by Araki et al. (1995), which disclosure is hereby incorporated by reference in its entirety, or by lipofection of the enzyme into the cells, such as described by Baubonis et al (1993), which disclosure is hereby incorporated by reference in its entirety; (b) transfecting the cell host with a vector comprising the Cre coding sequence operably linked to a promoter functional in the recombinant cell host, which promoter being optionally inducible, said vector being introduced in the recombinant cell host, such as described by Gu et al. (1993) and Sauer et al (1988), which disclosures are hereby incorporated by reference in their entireties; (c) introducing in the genome of the cell host a polynucleotide comprising the Cre coding sequence operably linked to a promoter functional in the recombinant cell host, which promoter is optionally inducible, and said polynucleotide being inserted in the genome of the cell host either by a random insertion event or an homologous recombination event, such as described by Gu et al. (1994).

[0919] In a specific embodiment, the vector containing the sequence to be inserted in the GENSET gene by homologous recombination is constructed in such a way that selectable markers are flanked by loxP sites of the same orientation, it is possible, by treatment by the Cre enzyme, to eliminate the selectable markers while leaving the GENSET sequences of interest that have been inserted by an homologous recombination event. Again, two selectable markers are needed: a positive selection marker to select for the recombination event and a negative selection marker to select for the homologous recombination event. Vectors and methods using the Cre-loxP system are described by Zou et al. (1994), which disclosure is hereby incorporated by reference in its entirety.

[0920] Thus, a third preferred DNA construct of the invention comprises, from 5′-end to 3′-end: (a) a first nucleotide sequence that is comprised in the GENSET genomic sequence; (b) a nucleotide sequence comprising a polynucleotide encoding a positive selection marker, said nucleotide sequence comprising additionally two sequences defining a site recognized by a recombinase, such as a loxP site, the two sites being placed in the same orientation; and (c) a second nucleotide sequence that is comprised in the GENSET genomic sequence, and is located on the genome downstream of the first GENSET nucleotide sequence (a).

[0921] The sequences defining a site recognized by a recombinase, such as a loxP site, are preferably located within the nucleotide sequence (b) at suitable locations bordering the nucleotide sequence for which the conditional excision is sought. In one specific embodiment, two loxP sites are located at each side of the positive selection marker sequence, in order to allow its excision at a desired time after the occurrence of the homologous recombination event.

[0922] In a preferred embodiment of a method using the third DNA construct described above, the excision of the polynucleotide fragment bordered by the two sites recognized by a recombinase, preferably two loxP sites, is performed at a desired time, due to the presence within the genome of the recombinant host cell of a sequence encoding the Cre enzyme operably linked to a promoter sequence, preferably an inducible promoter, more preferably a tissue-specific promoter sequence and most preferably a promoter sequence which is both inducible and tissue-specific, such as described by Gu et al. (1994).

[0923] The presence of the Cre enzyme within the genome of the recombinant cell host may result from the breeding of two transgenic animals, the first transgenic animal bearing the GENSET-derived sequence of interest containing the loxP sites as described above and the second transgenic animal bearing the Cre coding sequence operably linked to a suitable promoter sequence, such as described by Gu et al. (1994).

[0924] Spatio-temporal control of the Cre enzyme expression may also be achieved with an adenovirus based vector that contains the Cre gene thus allowing infection of cells, or in vivo infection of organs, for delivery of the Cre enzyme, such as described by Anton and Graham (1995) and Kanegae et al. (1995), which disclosures are hereby incorporated by reference in their entireties.

[0925] The DNA constructs described above may be used to introduce a desired nucleotide sequence of the invention, preferably a GENSET genomic sequence or a GENSET cDNA sequence, and most preferably an altered copy of a GENSET genomic or cDNA sequence, within a predetermined location of the targeted genome, leading either to the generation of an altered copy of a targeted gene (knock-out homologous recombination) or to the replacement of a copy of the targeted gene by another copy sufficiently homologous to allow an homologous recombination event to occur (knock-in homologous recombination).

### Modifying Genset Polypoptide Expression and/or Biological Activity

[0926] Modifying endogenous GENSET expression and/or biological activity is expressly contemplated by the present invention.

Screening for Compounds that Modulate GENSET Expression and/or Biological Activity

[0927] The present invention further relates to compounds able to modulate GENSET expression and/or biological activity and methods to use these compounds. Such compounds may interact with the regulatory sequences of GENSET genes or they may interact with GENSET polypeptides directly or indirectly.

Compounds Interacting with GENSET Regulatory Sequences

[0928] The present invention also concerns a method for screening substances or molecules that are able to interact with the regulatory sequences of a GENSET gene, such as for example promoter or enhancer sequences in untranscribed regions of the genomic DNA, as determined using any techniques known to those skilled in the art including those described in the section entitled “Identification of Promoters in Cloned Upstream Sequences, or such as regulatory sequences located in untranslated regions of GENSET mRNA.

[0929] Sequences within untranscribed or untranslated regions of polynucleotides of the invention may be identified by comparison to databases containing known regulatory sequence such as transcription start sites, transcription factor binding sites, promoter sequences, enhancer sequences, 5′UTR and 3′UTR elements (Pesole et al., 2000; http://igs-server.cnrs-mrs.fr/˜gauthere/UTR/index.html). Alternatively, the regulatory sequences of interest may-be identified through conventional mutagenesis or deletion analyses of reporter plasmids using, for instance, techniques described in the section entitled “Identification of Promoters in Cloned Upstream Sequences”.

[0930] Following the identification of potential GENSET regulatory sequences, proteins which interact with these regulatory sequences may be identified as described below.

[0931] Gel retardation assays may be performed independently in order to screen candidate molecules that are able to interact with the regulatory sequences of the GENSET gene, such as described by Fried and Crothers (1981), Garner and Revzin (1981) and Dent and Latchman (1993), the teachings of these publications being herein incorporated by reference. These techniques are based on the principle according to which a DNA or mRNA fragment which is bound to a protein migrates slower than the same unbound DNA or mRNA fragment. Briefly, the target nucleotide sequence is labeled. Then the labeled target nucleotide sequence is brought into contact with either a total nuclear extract from cells containing regulation factors, or with different candidate molecules to be tested. The interaction between the target regulatory sequence of the GENSET gene and the candidate molecule or the regulation factor is detected after gel or capillary electrophoresis through a retardation in the migration.

[0932] Nucleic acids encoding proteins which are able to interact with the promoter sequence of the GENSET gene, more particularly a nucleotide sequence selected from the group consisting of the polynucleotides of the 5′ and 3′ regulatory region or a fragment or variant thereof, may be identified by using a one-hybrid system, such as that described in the booklet enclosed in the Matchmaker One-Hybrid System kit from Clontech (Catalog Ref. no. K1603-1, the technical teachings of which are herein incorporated by reference). Briefly, the target nucleotide sequence is cloned upstream of a selectable reporter sequence and the resulting polynucleotide construct is integrated in the yeast genome (Saccharomyces cerevisiae). Preferably, multiple copies of the target sequences are inserted into the reporter plasmid in tandem. The yeast cells containing the reporter sequence in their genome are then transformed with a library comprising fusion molecules between cDNAs encoding candidate proteins for binding onto the regulatory sequences of the GENSET gene and sequences encoding the activator domain of a yeast transcription factor such as GAL4. The recombinant yeast cells are plated in a culture broth for selecting cells expressing the reporter sequence. The recombinant yeast cells thus selected contain a fusion protein that is able to bind onto the target regulatory sequence of the GENSET gene. Then, the cDNAs encoding the fusion proteins are sequenced and may be cloned into expression or transcription vectors in vitro. The binding of the encoded polypeptides to the target regulatory sequences of the GENSET gene may be confirmed by techniques familiar to the one skilled in the art, such as gel retardation assays or DNAse protection assays.

Ligands Interacting with GENSET Polypeptides

[0933] For the purpose of the present invention, a ligand means a molecule, such as a protein, a peptide, an antibody or any synthetic chemical compound capable of binding to a GENSET protein or one of its fragments or variants or to modulate the expression of the polynucleotide coding for GENSET or a fragment or variant thereof.

[0934] In the ligand screening method according to the present invention, a biological sample or a defined molecule to be tested as a putative ligand of a GENSET protein is brought into contact with the corresponding purified GENSET protein, for example the corresponding purified recombinant GENSET protein produced by a recombinant cell host as described herein, in order to form a complex between this protein and the putative ligand molecule to be tested.

[0935] As an illustrative example, to study the interaction of a GENSET protein, or a fragment comprising a contiguous span of at least 6 amino acids, preferably at least 8 to 10 amino acids, more preferably at least 12, 15, 20, 25, 30, 40, 50, or 100 amino acids of a polypeptide selected from the group consisting of sequences of SEQ ID NOs: 170-338, 456-560, 785-918 and polypeptides encoded by the clone inserts of the deposited clone pool, with drugs or small molecules, such as molecules generated through combinatorial chemistry approaches, the microdialysis coupled to HPLC method described by Wang et al. (1997) or the affinity capillary electrophoresis method described by Bush et al. (1997), the disclosures of which are incorporated by reference, can be used.

[0936] In further methods, peptides, drugs, fatty acids, lipoproteins, or small molecules which interact with a GENSET protein, or a fragment comprising a contiguous span of at least 6 amino acids, preferably at least 8 to 10 amino acids, more preferably at least 12, 15, 20, 25, 30, 40, 50, or 100 amino acids of a polypeptide selected from the group consisting of sequences of SEQ ID NOs:170-338, 456-560, 785-918 and polypeptides encoded by the clone inserts of the deposited clone pool may be identified using assays such as the following. The molecule to be tested for binding is labeled with a detectable label, such as a fluorescent, radioactive, or enzymatic tag and placed in contact with immobilized GENSET protein, or a fragment thereof under conditions which permit specific binding to occur. After removal of non-specifically bound molecules, bound molecules are detected using appropriate means.

[0937] Various candidate substances or molecules can be assayed for interaction with a GENSET polypeptide. These substances or molecules include, without being limited to, natural or synthetic organic compounds or molecules of biological origin such as polypeptides. When the candidate substance or molecule comprises a polypeptide, this polypeptide may be the resulting expression product of a phage clone belonging to a phage-based random peptide library, or alternatively the polypeptide may be the resulting expression product of a cDNA library cloned in a vector suitable for performing a two-hybrid screening assay.

A. Candidate Ligands Obtained from Random Peptide Libraries

[0938] In a particular embodiment of the screening method, the putative ligand is the expression product of a DNA insert contained in a phage vector (Parmley and Smith, 1988). Specifically, random peptide phages libraries are used. The random DNA inserts encode for peptides of 8 to 20 amino acids in length (Oldenburg et al., 1992; Valadon et al., 1996; Lucas, 1994; Westerink, 1995; Felici et al., 1991), which disclosures are hereby incorporated by reference in their entireties. According to this particular embodiment, the recombinant phages expressing a protein that binds to an immobilized GENSET protein is retained and the complex formed between the GENSET protein and the recombinant phage may be subsequently immunoprecipitated by a polyclonal or a monoclonal antibody directed against the GENSET protein.

[0939] Once the ligand library in recombinant phages has been constructed, the phage population is brought into contact with the immobilized GENSET protein. Then the preparation of complexes is washed in order to remove the non-specifically bound recombinant phages. The phages that bind specifically to the GENSET protein are then eluted by a buffer (acid pH) or immunoprecipitated by the monoclonal antibody produced by the hybridoma anti-GENSET, and this phage population is subsequently amplified by an over-infection of bacteria (for example E. coli). The selection step may be repeated several times, preferably 24 times, in order to select the more specific recombinant phage clones. The last step comprises characterizing the peptide produced by the selected recombinant phage clones either by expression in infected bacteria-and isolation, expressing the phage insert in another host-vector system, or sequencing the insert contained in the selected recombinant phages.

B. Candidate Ligands Obtained by Competition Experiments.

[0940] Alternatively, peptides, drugs or small molecules which bind to a GENSET protein or fragment thereof comprising a contiguous span of at least 6 amino acids, preferably at least 8 to 10 amino acids, more preferably at least 12, 15, 20, 25, 30, 40, 50, or 100 amino acids of a polypeptide selected from the group consisting of sequences of SEQ ID NOs:170-338, 456-560, 785-918 and polypeptides encoded by the clone inserts of the deposited clone pool, may be identified in competition experiments. In such assays, the GENSET protein, or a fragment thereof, is immobilized to a surface, such as a plastic plate. Increasing amounts of the peptides, drugs or small molecules are placed in contact with the immobilized GENSET protein, or a fragment thereof, in the presence of a detectable labeled known GENSET protein ligand. For example, the GENSET ligand may be detectably labeled with a fluorescent, radioactive, or enzymatic tag. The ability of the test molecule to bind the GENSET protein, or a fragment thereof, is determined by measuring the amount of detectably labeled known ligand bound in the presence of the test molecule. A decrease in the amount of known ligand bound to the GENSET protein, or a fragment thereof, when the test molecule is present indicated that the test molecule is able to bind to the GENSET protein, or a fragment thereof.

C. Candidate Ligands Obtained by Affinity Chromatography.

[0941] Proteins or other molecules interacting with a GENSET protein, or a fragment thereof comprising a contiguous span of at least 6 amino acids, preferably at least 8 to 10 amino acids, more preferably at least 12, 15, 20, 25, 30, 40, 50, or 100 amino acids of a polypeptide selected from the group consisting of sequences of SEQ ID NOs: 170-338, 456-560, 785-918 and polypeptides encoded by the clone inserts of the deposited clone pool, can also be found using affinity columns which contain the GENSET protein, or a fragment thereof. The GENSET protein, or a fragment thereof, may be attached to the column using conventional techniques including chemical coupling to a suitable column matrix such as agarose, Affi Gel®, or other matrices familiar to those of skill in art. In some embodiments of this method, the affinity column contains chimeric proteins in which the GENSET protein, or a fragment thereof, is fused to glutathion S transferase (GST). A mixture of cellular proteins or pool of expressed proteins as described above is applied to the affinity column. Proteins or other molecules interacting with the GENSET protein, or a fragment thereof, attached to the column can then be isolated and analyzed on 2-D electrophoresis gel as described in Ramunsen et al. (1997), the disclosure of which is incorporated by reference. Alternatively, the proteins retained on the affinity column can be purified by electrophoresis based methods and sequenced. The same method can be used to isolate antibodies, to screen phage display products, or to screen phage display human antibodies.

D. Candidate Ligands Obtained by Optical Biosensor Methods

[0942] Proteins interacting with a GENSET protein, or a fragment comprising a contiguous span of at least 6 amino acids, preferably at least 8 to 10 amino acids, more preferably at least 12, 15, 20, 25, 30, 40, 50, or 100 amino acids of a polypeptide selected from the group consisting of sequences of SEQ ID NOs:170-338, 456-560, 785-918 and polypeptides encoded by the clone inserts of the deposited clone pool, can also be screened by using an Optical Biosensor as described in Edwards and Leatherbarrow (1997) and also in Szabo et al. (1995), the disclosures of which are incorporated by reference. This technique permits the detection of interactions between molecules in real time, without the need of labeled molecules. This technique is based on the surface plasmon resonance (SPR) phenomenon. Briefly, the candidate ligand molecule to be tested is attached to a surface (such as a carboxymethyl dextran matrix). A light beam is directed towards the side of the surface that does not contain the sample to be tested and is reflected by said surface. The SPR phenomenon causes a decrease in the intensity of the reflected light with a specific association of angle and wavelength. The binding of candidate ligand molecules cause a change in the refraction index on the surface, which change is detected as a change in the SPR signal. For screening of candidate ligand molecules or substances that are able to interact with the GENSET protein, or a fragment thereof, the GENSET protein, or a fragment thereof, is immobilized onto a surface. This surface comprises one side of a cell through which flows the candidate molecule to be assayed. The binding of the candidate molecule on the GENSET protein, or a fragment thereof, is detected as a change of the SPR signal. The candidate molecules tested may be proteins, peptides, carbohydrates, lipids, or small molecules generated by combinatorial chemistry. This technique may also be performed by immobilizing eukaryotic or prokaryotic cells or lipid vesicles exhibiting an endogenous or a recombinantly expressed GENSET protein at their surface.

[0943] The main advantage of the method is that it allows the determination of the association rate between the GENSET protein and molecules interacting with the GENSET protein. It is thus possible to select specifically ligand molecules interacting with the GENSET protein, or a fragment thereof, through strong or conversely weak association constants.

E. Candidate Ligands Obtained Through a Two-Hybrid Screening Assay.

[0944] The yeast two-hybrid system is designed to study protein-protein interactions in vivo (Fields and Song, 1989), which disclosure is hereby incorporated by reference in its entirety, and relies upon the fusion of a bait protein to the DNA binding domain of the yeast Gal4 protein. This technique is also described in the U.S. Pat. No. 5,667,973 and the U.S. Pat. No. 5,283,173, the technical teachings of both patents being herein incorporated by reference.

[0945] The general procedure of library screening by the two-hybrid assay may be performed as described by Harper et al. (1993) or as described by Cho et al. (1998) or also Fromont-Racine et al. (1997), which disclosures are hereby incorporated by reference in their entireties.

[0946] The bait protein or polypeptide comprises, consists essentially of, or consists of a GENSET polypeptide or a fragment thereof comprising a contiguous span of at least 6 amino acids, preferably at least 8 to 10 amino acids, more preferably at least 12, 15, 20, 25, 30, 40, 50, or 100 amino acids of a polypeptide selected from the group consisting of sequences of SEQ ID NOs:170-338, 456-560, 785-918 and polypeptides encoded by the clone inserts of the deposited clone pool.

[0947] More precisely, the nucleotide sequence encoding the GENSET polypeptide or a fragment or variant thereof is fused to a polynucleotide encoding the DNA binding domain of the GAL4 protein, the fused nucleotide sequence being inserted in a suitable expression vector, for example pAS2 or pM3.

[0948] Then, a human cDNA library is constructed in a specially designed vector, such that the human cDNA insert is fused to a nucleotide sequence in the vector that encodes the transcriptional domain of the GAL4 protein. Preferably, the vector used is the pACT vector. The polypeptides encoded by the nucleotide inserts of the human cDNA library are termed “prey” polypeptides.

[0949] A third vector contains a detectable marker gene, such as beta galactosidase gene or CAT gene that is placed under the control of a regulation sequence that is responsive to the binding of a complete Gal4 protein containing both the transcriptional activation domain and the DNA binding domain. For example, the vector pG5EC may be used.

[0950] Two different yeast strains are also used. As an illustrative but non limiting example the two different yeast strains may be the followings:

[0951] Y190, the phenotype of which is (MATa, Leu2-3, 112 ura3-12, trp1-901, his3-D200, ade2-101, gal4Dga1180D URA3 GAL-LacZ, LYS GAL-HI S3, cyh^{r});

[0952] Y187, the phenotype of which is (MATa gal4 gal80 his3 trp1-901 ade2-101 ura3-52 leu2-3, -112 URA3 GAL-lacZmet⁻), which is the opposite mating type of Y190.

[0953] Briefly, 20 μg of pAS2/GENSET and 20 μg of pACT-cDNA library are co-transformed into yeast strain Y190. The transformants are selected for growth on minimal media lacking histidine, leucine and tryptophan, but containing the histidine synthesis inhibitor 3-AT (50 mM). Positive colonies are screened for beta galactosidase by filter lift assay. The double positive colonies (His⁺, beta-gal⁺) are then grown on plates lacking histidine, leucine, but containing tryptophan and cycloheximide (10 mg/ml) to select for loss of pAS2/GENSET plasmids but retention of pACT-cDNA library plasmids. The resulting Y190 strains are mated with Y187 strains expressing GENSET or non-related control proteins; such as cyclophilin B, lamin, or SNF1, as Gal4 fusions as described by Harper et al. (1993) and by Bram et al. (1993), which disclosures are hereby incorporated by reference in their entireties, and screened for beta galactosidase by filter lift assay. Yeast clones that are beta gal-after mating with the control Gal4 fusions are considered false positives.

[0954] In another embodiment of the two-hybrid method according to the invention, interaction between the GENSET or a fragment or variant thereof with cellular proteins may be assessed using the Matchmaker Two Hybrid System 2 (Catalog No. K1604-1, Clontech). As described in the manual accompanying the kit, the disclosure of which is incorporated herein by reference, nucleic acids encoding the GENSET protein or a portion thereof, are inserted into an expression vector such that they are in frame with DNA encoding the DNA binding domain of the yeast transcriptional activator GAL4. A desired cDNA, preferably human cDNA, is inserted into a second expression vector such that they are in frame with DNA encoding the activation domain of GAL4. The two expression plasmids are transformed into yeast and the yeast are plated on selection medium which selects for expression of selectable markers on each of the expression vectors as well as GALA dependent expression of the HIS3 gene. Transformants capable of growing on medium lacking histidine are screened for GAL4 dependent lacZ expression. Those cells which are positive in both the histidine selection and the lacZ assay contain interaction between GENSET and the protein or peptide encoded by the initially selected cDNA insert

Compounds Modulating GENSET Biological Activity

[0955] Another method of screening for compounds that modulate GENSET expression and/or biological activity is by measuring the effects of test compounds on specific biological activity, e.g. a GENSET biological activity in a host cell. In one embodiment, the present invention relates to a method of identifying an agent which alters GENSET biological activity, wherein a nucleic acid construct comprising a nucleic acid which encodes a mammalian GENSET polypeptide is introduced into a host cell. The host cells produced are maintained under conditions appropriate for expression of the encoded mammalian GENSET polypeptides, whereby the nucleic acid is expressed. The host cells are then contacted with a compound to be assessed (an “agent,” or “test agent”), and the properties of the cells is assessed. Detection of a change in any GENSET polypeptide-associated property in the presence of the agent indicates that the agent alters GENSET activity. In a particular embodiment, the invention relates to a method of identifying an agent which is an activator of GENSET activity, wherein detection of an increase of any GENSET polypeptide-associated property in the presence of the agent indicates that the agent activates GENSET activity. In another particular embodiment, the invention relates to a method of identifying an agent which is an inhibitor of GENSET activity, wherein detection of a decrease of any GENSET polypeptide-associated property in the presence of the agent indicates that the agent inhibits GENSET activity.

[0956] In a particular embodiment, a high throughput screen can be used to identify agents that activate (enhance) or inhibit GENSET activity (See e.g., PCT publication WO 98/45438, which disclosure is hereby incorporated by reference in its entirety). For example, the method of identifying an agent which alters GENSET activity can be performed as follows. A nucleic acid construct comprising a polynucleotide which encodes a mammalian GENSET polypeptide is introduced into a host cell to produce recombinant host cells. The recombinant host cells are then maintained under conditions appropriate for expression of the encoded mammalian GENSET polypeptide, whereby the nucleic acid is expressed. The compound to be assessed is added to the recombinant host cells; the resulting combination is referred to as a test sample. A detectable, GENSET polypeptide-associated property of the cells is detected. A control can be used in the methods of detecting agents which alter GENSET activity. For example, the control sample includes the same reagents but lacks the compound or agent being assessed; it is treated in the same manner as the test sample.

Methods of Screening for Compounds Modulating GENSET Expression and/or Activity

[0957] The present invention also relates to methods of screening compounds for their ability to modulate (e.g. increase or inhibit) the activity or expression of GENSET. More specifically, the present invention relates to methods of testing compounds for their ability either to increase or to decrease expression or activity of GENSET. The assays are performed in vitro or in vivo.

In Vitro Methods

[0958] In vitro, cells expressing GENSET polypeptides are incubated in the presence and absence of the test compound. By determining the level of GENSET expression in the presence of the test compound or the level of GENSET activity in the presence of the test compound, compounds can be identified that suppress or enhance GENSET expression or activity. Alternatively, constructs comprising a GENSET regulatory sequence operably linked to a reporter gene (e.g. luciferase, chloramphenicol acetyl transferase, LacZ, green fluorescent protein, etc.) can be introduced into host cells and the effect of the test compounds on expression of the reporter gene detected. Cells suitable for use in the foregoing assays include, but are not limited to, cells having the same origin as tissues or cell lines in which the polypeptide is known to be expressed using the data from Tables III, IV, or V.

[0959] Consequently, the present invention encompasses a method for screening molecules that modulate the expression of a GENSET gene, said screening method comprising the steps of:

[0960] a) cultivating a prokaryotic or an eukaryotic cell that has been transfected with a nucleotide sequence encoding a GENSET protein or a variant or a fragment thereof, placed under the control of its own promoter;

[0961] b) bringing into contact said cultivated cell with a molecule to be tested;

[0962] c) quantifying the expression of said GENSET protein or a variant or a fragment thereof in the presence of said molecule.

[0963] Using DNA recombination techniques well known by the one skill in the art, the GENSET protein encoding DNA sequence is inserted into an expression vector, downstream from its promoter sequence. As an illustrative example, the promoter sequence of the GENSET gene is contained in the 5′ untranscribed region of the GENSET genomic DNA.

[0964] The quantification of the expression of a GENSET protein may be realized either at the mRNA level (using for example Northen blots, RT-PCR, preferably quantitative RT-PCR with primers and probes specific for the GENSET mRNA of interest) or at the protein level (using polyclonal or monoclonal antibodies in immunoassays such as ELISA or RIA assays, Western blots, or immunochemistry).

[0965] The present invention also concerns a method for screening substances or molecules that are able to increase, or in contrast to decrease, the level of expression of a GENSET gene. Such a method may allow the one skilled in the art to select substances exerting a regulating effect on the expression level of a GENSET gene and which may be useful as active ingredients included in pharmaceutical compositions for treating patients suffering from disorders associated with abnormal levels of GENSET products.

[0966] Thus, another part of the present invention is a method for screening a candidate molecule that modulates the expression of a GENSET gene, this method comprises the following steps:

[0967] a) providing a recombinant cell host containing a nucleic acid, wherein said nucleic acid comprises a GENSET 5′ regulatory region or a regulatory active fragment or variant thereof, operably linked to a polynucleotide encoding a detectable protein;

[0968] b) obtaining a candidate molecule; and

[0969] c) determining the ability of said candidate molecule to modulate the expression levels of said polynucleotide encoding the detectable protein.

[0970] In a further embodiment, said nucleic acid comprising a GENSET 5′ regulatory region or a regulatory active fragment or variant thereof, includes the 5′UTR region of a GENSET cDNA selected from the group comprising of the 5′UTRs of the sequences of SEQ ID NOs:1-69, 339-455, 561-784, sequences of clones inserts of the deposited clone pool, regulatory active fragments and variants thereof. In a more preferred embodiment of the above screening method, said nucleic acid includes a promoter sequence which is endogenous with respect to the GENSET 5′UTR sequence. In another more preferred embodiment of the above screening method, said nucleic acid includes a promoter sequence which is exogenous with respect to the GENSET 5′UTR sequence defined therein.

[0971] Preferred polynucleotides encoding a detectable protein are polynucleotides encoding beta galactosidase, green fluorescent protein (GFP) and chloramphenicol acetyl transferase (CAT).

[0972] The invention further relates to a method for the production of a pharmaceutical composition comprising a method of screening a candidate molecule that modulates the expression of a GENSET gene and furthermore mixing the identified molecule with a pharmaceutically acceptable carrier.

[0973] The invention also pertains to kits for the screening of a candidate substance modulating the expression of a GENSET gene. Preferably, such kits comprise a recombinant vector that allows the expression of a GENSET 5′ regulatory region or a regulatory active fragment or a variant thereof, operably linked to a polynucleotide encoding a detectable protein or a GENSET protein or a fragment or a variant thereof. More preferably, such kits include a recombinant vector that comprises a nucleic acid including the 5′UTR region of a GENSET cDNA selected from the group comprising the 5′UTRs of the sequences of SEQ ID NOs:1-169, 339-455, 561-784, sequences of clone inserts of the deposited clone pool, regulatory active fragments and variants thereof, being operably linked to a polynucleotide encoding a detectable protein.

[0974] For the design of suitable recombinant vectors useful for performing the screening methods described above, it will be referred to the section of the present specification wherein the preferred recombinant vectors of the invention are detailed.

[0975] Another object of the present invention comprises methods and kits for the screening of candidate substances that interact with a GENSET polypeptide, fragments or variants thereof. By their capacity to bind covalently or non-covalently to a GENSET protein, fragments or variants thereof, these substances or molecules may be advantageously used both in vitro and in vivo.

[0976] In vitro, said interacting molecules may be used as detection means in order to identify the presence of a GENSET protein in a sample, preferably a biological sample.

[0977] A method for the screening of a candidate substance that interact with a GENSET polypeptide, fragments or variants thereof, said methods comprising the following steps:

[0978] a) providing a polypeptide comprising, consisting essentially of, or consisting of a GENSET protein or a fragment comprising a contiguous span of at least 6 amino acids, preferably at least 8 to 10 amino acids, more preferably at least 12, 15, 20, 25, 30, 40, 50, or 100 amino acids of a polypeptide selected from the group consisting of sequences of SEQ ID NOs:170-338, 456-560, 785-918 and polypeptides encoded by the clone inserts of the deposited clone pool;

[0979] b) obtaining a candidate substance;

[0980] c) bringing into contact said polypeptide with said candidate substance;

[0981] d) detecting the complexes formed between said polypeptide and said candidate substance.

[0982] The invention further relates to a method for the production of a pharmaceutical composition comprising a method for the screening of a candidate substance that interact with a GENSET polypeptide, fragments or variants thereof and furthermore mixing the identified substance with a pharmaceutically acceptable carrier.

[0983] The invention further concerns a kit for the screening of a candidate substance interacting with the GENSET polypeptide, wherein said kit comprises:

[0984] a) a polypeptide comprising, consisting essentially of, or consisting of a GENSET protein or a fragment comprising a contiguous span of at least 6 amino acids, preferably at least 8 to 10 amino acids, more preferably at least 12, 15, 20, 25, 30, 40, 50, or 100 amino acids of a polypeptide selected from the group consisting of sequences of SEQ ID NOs:170-338, 456-560, 785-918 and polypeptides encoded by the clone inserts of the deposited clone pool; and

[0985] b) optionally means useful to detect the complex formed between said polypeptide or a variant thereof and the candidate substance.

[0986] In a preferred embodiment of the kit described above, the detection means comprises a monoclonal or polyclonal antibody binding to said GENSET protein or fragment or variant thereof.

In Vivo Methods

[0987] Compounds that suppress or enhance GENSET expression can also be identified using in vivo screens. In these assays, the test compound is administered (e.g. IV, IP, IM, orally, or otherwise), to the animal, for example, at a variety of dose levels. The effect of the compound on GENSET expression is determined by comparing GENSET levels, for example in tissues known to express the gene of interest using, for example the data obtained in Tables III, IV, or V, and using Northern blots, immunoassays, PCR, etc., as described above. Suitable test animals include, but are not limited to, rodents (e.g., mice and rats), primates, and rabbits. Humanized mice can also be used as test animals, that is mice in which the endogenous mouse protein is ablated (knocked out) and the homologous human protein added back by standard transgenic approaches. Such mice express only the human form of a protein. Humanized mice expressing only the human GENSET can be used to study in vivo responses to potential agents regulating GENSET protein or mRNA levels. As an example, transgenic mice have been produced carrying the human apoE4 gene. They are then bred with a mouse line that lacks endogenous apoE, to produce an animal model carrying human proteins believed to be instrumental in development of Alzheimer's pathology. Such transgenic animals are useful for dissecting the biochemical and physiological steps of disease, and for development of therapies for disease intervention (Loring, et al, 1996) (incorporated herein by reference in its entirety).

Uses for Compounds Modulating GENSET Expression and/or Biological Activity

[0988] Using in vivo (or in vitro) systems, it may be possible to identify compounds that exert a tissue specific effect, for example, that increase GENSET expression or activity only in tissues of interest, such as the adrenal gland, bone marrow, brain, cerebellum, colon, fetal brain, fetal kidney, fetal liver, heart, hypertrophic prostate, kidney, liver, lung, lymph ganglia, lymphocytes, muscle, ovary, pancreas, pituitary gland, placenta, prostate, salivary gland, spinal cord, spleen, stomach, intestine, substantia nigra, testis, thyroid, umbilical cord, and uterus. Screening procedures such as those described above are also useful for identifying agents for their potential use in pharmacological intervention strategies. Agents that enhance GENSET gene expression or stimulate its activity may thus be used to induce any phenotype associated with a GENSET gene, or to treat disorders resulting from a deficiency of a GENSET polypeptide activity or expression. Compounds that suppress GENSET polypeptide expression or inhibit its activity can be used to treat any disease or condition associated with increased or deleterious GENSET polypeptide activity or expression.

[0989] Also encompassed by the present invention is an agent which interacts with a GENSET gene or polypeptide directly or indirectly, and inhibits or enhances GENSET polypeptide expression and/or function. In one embodiment, the agent is an inhibitor which interferes with a GENSET polypeptide directly (e.g., by binding the GENSET polypeptide) or indirectly (e.g., by blocking the ability of the GENSET polypeptide to have a GENSET biological activity). In a particular embodiment, an inhibitor of a GENSET protein is an antibody specific for the GENSET protein or a functional portion of the GENSET protein; that is, the antibody binds a GENSET polypeptide. For example, the antibody can be specific for a polypeptide encoded by one of the nucleic acid sequences of human GENSETs (SEQ D NOs:1-169, 339-455, 561-784), a mammalian GENSET nucleic acid, or portions thereof. Alternatively, the inhibitor can be an agent other than an antibody (e.g., small organic molecule, protein or peptide) which binds the GENSET polypeptide and blocks its activity. For example, the inhibitor can be an agent which mimics the GENSET polypeptide structurally, but lacks its function. Alternatively, it can be an agent which binds to or interacts with a molecule which the GENSET polypeptide normally binds to or interacts with, thus blocking the GENSET polypepetide from doing so and preventing it from exerting the effects it would normally exert.

[0990] In another embodiment, the agent is an enhancer (activator) of a GENSET polypeptide which increases the activity of the GENSET polypeptide (increases the effect of a given amount or level of GENSET), increases the length of time it is effective (by preventing its degradation or otherwise prolonging the time during which it is active) or both either directly or indirectly. For example, GENSET polynucleotides and polypeptides can be used to identify drugs which increase or decrease the ability of GENSET polypeptides to induce GENSET biological activity, which drugs are useful for the treatment or prevention of any disease or condition associated with a GENSET biological activity.

[0991] The GENSET sequences of the present invention can also be used to generate nonhuman gene knockout animals, such as mice, which lack a GENSET gene or transgenically overexpress a GENSET gene. For example, such GENSET gene knockout mice can be generated and used to obtain further insight into the function of the GENSET gene as well as assess the specificity of GENSET activators and inhibitors. Also, over expression of the GENSET gene (e.g., a human GENSET gene) in transgenic mice can be used as a means of creating a test system for GENSET activators and inhibitors (e.g., against a human GENSET polypeptide). In addition, the GENSET gene can be used to clone the GENSET promoter/enhancer in order to identify regulators of GENSET gene transcription. GENSET gene knockout animals include animals which completely or partially lack the GENSET gene and/or GENSET activity or function. Thus the present invention relates to a method of inhibiting (partially or completely) a GENSET biological activity in a mammal (e.g., a human), the method comprising administering to the mammal an effective amount of an inhibitor of a GENSET polypeptide or polynucleotide. The invention also relates to a method of enhancing a GENSET biological activity in a mammal, the method comprising administering to the mammal an effective amount of an enhancer of a GENSET polypeptide or polynucleotide.

Inhibiting GENSET Gene Expression

[0992] Therapeutic compositions according to the present invention may comprise advantageously one or several GENSET oligonucleotide fragments as an antisense tool or a triple helix tool that inhibits the expression of the corresponding GENSET gene.

Antisense Approach

[0993] In antisense approaches, nucleic acid sequences complementary to an mRNA are hybridized to the mRNA intracellularly, thereby blocking the expression of the protein encoded by the mRNA. The antisense nucleic acid molecules to be used in gene therapy may be either DNA or RNA sequences. Preferred methods using antisense polynucleotide according to the present invention are the procedures described by Sczakiel et al. (1995), which disclosure is hereby incorporated by reference in its entirety.

[0994] Preferably, the antisense tools are chosen among the polynucleotides (15-200 bp long) that are complementary to GENSET mRNA, more preferably to the 5′end of the GENSET mRNA. In another embodiment, a combination of different antisense polynucleotides complementary to different parts of the desired targeted gene are used.

[0995] Other preferred antisense polynucleotides according to the present invention are sequences complementary to either a sequence of GENSET mRNAs comprising the translation initiation codon ATG or a sequence of GENSET genomic DNA containing a splicing donor or acceptor site.

[0996] Preferably, the antisense polynucleotides of the invention have a 3′ polyadenylation signal that has been replaced with a self-cleaving ribozyme sequence, such that RNA polymerase II transcripts are produced without poly(A) at their 3′ ends, these antisense polynucleotides being incapable of export from the nucleus, such as described by Liu et al. (1994), which disclosure is hereby incorporated by reference in its entirety. In a preferred embodiment, these GENSET antisense polynucleotides also comprise, within the ribozyme cassette, a histone stem-loop structure to stabilize cleaved transcripts against 3′-5′ exonucleolytic degradation, such as the structure described by Eckner et al. (1991), which disclosure is hereby incorporated by reference in its entirety.

[0997] The antisense nucleic acids should have a length and melting temperature sufficient to permit formation of an intracellular duplex having sufficient stability to inhibit the expression of the GENSET mRNA in the duplex. Strategies for designing antisense nucleic acids suitable for use in gene therapy are disclosed in Green et al., (1986) and Izant and Weintraub, (1984), the disclosures of which are incorporated herein by reference.

[0998] In some strategies, antisense molecules are obtained by reversing the orientation of the GENSET coding region with respect to a promoter so as to transcribe the opposite strand from that which is normally transcribed in the cell. The antisense molecules may be transcribed using in vitro transcription systems such as those which employ T7 or SP6 polymerase to generate the transcript. Another approach involves transcription of GENSET antisense nucleic acids in vivo by operably linking DNA containing the antisense sequence to a promoter in a suitable expression vector.

[0999] Alternatively, oligonucleotides which are complementary to the strand normally transcribed in the cell may be synthesized in vitro. Thus, the antisense nucleic acids are complementary to the corresponding mRNA and are capable of hybridizing to the mRNA to create a duplex. In some embodiments, the antisense sequences may contain modified sugar phosphate backbones to increase stability and make them less sensitive to RNase activity. Examples of modifications suitable for use in antisense strategies include 2′ O-methyl RNA oligonucleotides and Protein-nucleic acid (PNA) oligonucleotides. Further examples are described by Rossi et al., (1991), which disclosure is hereby incorporated by reference in its entirety.

[1000] Various types of antisense oligonucleotides complementary to the sequence of the GENSET cDNA or genomic DNA may be used. In one preferred embodiment, stable and semi-stable antisense oligonucleotides described in International Application No. PCT WO94/23026, hereby incorporated by reference, are used. In these molecules, the 3′ end or both the 3′ and 5′ ends are engaged in intramolecular hydrogen bonding between complementary base pairs. These molecules are better able to withstand exonuclease attacks and exhibit increased stability compared to conventional antisense oligonucleotides.

[1001] In another preferred embodiment, the antisense oligodeoxynucleotides against herpes simplex virus types 1 and 2 described in International Application No. WO 95/04141, hereby incorporated by reference, are used.

[1002] In yet another preferred embodiment, the covalently cross-linked antisense oligonucleotides described in International Application No. WO 96/31523, hereby incorporated by reference, are used. These double- or single-stranded oligonucleotides comprise one or more, respectively, inter- or intra-oligonucleotide covalent cross-linkages, wherein the linkage consists of an amide bond between a primary amine group of one strand and a carboxyl group of the other strand or of the same strand, respectively, the primary amine group being directly substituted in the 2′ position of the strand nucleotide monosaccharide ring, and the carboxyl group being carried by an aliphatic spacer group substituted on a nucleotide or nucleotide analog of the other strand or the same strand, respectively.

[1003] The antisense oligodeoxynucleotides and oligonucleotides disclosed in International Application No. WO 92/18522, incorporated by reference, may also be used. These molecules are stable to degradation and contain at least one transcription control recognition sequence which binds to control proteins and are effective as decoys therefor. These molecules may contain “hairpin” structures, “dumbbell” structures, “modified dumbbell” structures, “cross-linked” decoy structures and “loop” structures.

[1004] In another preferred embodiment, the cyclic double-stranded oligonucleotides described in European Patent Application No. 0 572 287 A2, hereby incorporated by reference are used. These ligated oligonucleotide “dumbbells” contain the binding site for a transcription factor and inhibit expression of the gene under control of the transcription factor by sequestering the factor.

[1005] Use of the closed antisense oligonucleotides disclosed in International Application No. WO 92/19732, hereby incorporated by reference, is also contemplated. Because these molecules have no free ends, they are more resistant to degradation by exonucleases than are conventional oligonucleotides. These oligonucleotides may be multifunctional, interacting with several regions which are not adjacent to the target mRNA.

[1006] The appropriate level of antisense nucleic acids required to inhibit gene expression may be determined using in vitro expression analysis. The antisense molecule may be introduced into the cells by diffusion, injection, infection or transfection using procedures known in the art. For example, the antisense nucleic acids can be introduced into the body as a bare or naked oligonucleotide, oligonucleotide encapsulated in lipid, oligonucleotide sequence encapsidated by viral protein, or as an oligonucleotide operably linked to a promoter contained in an expression vector. The expression vector may be any of a variety of expression vectors known in the art, including retroviral or viral vectors, vectors capable of extrachromosomal replication, or integrating vectors. The vectors may be DNA or RNA.

[1007] The antisense molecules are introduced onto cell samples at a number of different concentrations preferably between 1×10⁻¹⁰M to 1×10⁻⁴M. Once the minimum concentration that can adequately control gene expression is identified, the optimized dose is translated into a dosage suitable for use in vivo. For example, an inhibiting concentration in culture of 1×10⁻⁷ translates into a dose of approximately 0.6 mg/kg bodyweight. Levels of oligonucleotide approaching 100 mg/kg bodyweight or higher may be possible after testing the toxicity of the oligonucleotide in laboratory animals. It is additionally contemplated that cells from the vertebrate are removed, treated with the antisense oligonucleotide, and reintroduced into the vertebrate.

[1008] In a preferred application of this invention, the polypeptide encoded by the gene is first identified, so that the effectiveness of antisense inhibition on translation can be monitored using techniques that include but are not limited to antibody-mediated tests such as RIAs and ELISA, functional assays, or radiolabeling.

[1009] An alternative to the antisense technology that is used according to the present invention comprises using ribozymes that will bind to a target sequence via their complementary polynucleotide tail and that will cleave the corresponding RNA by hydrolyzing its target site (namely “hammerhead ribozymes”). Briefly, the simplified cycle of a hammerhead ribozyme comprises (1) sequence specific binding to the target RNA via complementary antisense sequences; (2) site-specific hydrolysis of the cleavable motif of the target strand; and (3) release of cleavage products, which gives rise to another catalytic cycle. Indeed, the use of long-chain antisense polynucleotide (at least 30 bases long) or ribozymes with long antisense arms are advantageous. A preferred delivery system for antisense ribozyme is achieved by covalently linking these antisense ribozymes to lipophilic groups or to use liposomes as a convenient vector. Preferred antisense ribozymes according to the present invention are prepared as described by Rossi et al, (1991) and Sczakiel et al. (1995), the specific preparation procedures being referred to in said articles being herein incorporated by reference.

Triple Helix Approach

[1010] The GENSET genomic DNA may also be used to inhibit the expression of the GENSET gene based on intracellular triple helix formation.

[1011] Triple helix oligonucleotides are used to inhibit transcription from a genome. They are particularly useful for studying alterations in cell activity when it is associated with a particular gene. The GENSET cDNAs or genomic DNAs of the present invention or, more preferably, a fragment of those sequences, can be used to inhibit gene expression in individuals having diseases associated with expression of a particular gene. Similarly, a portion of the GENSET genomic DNA can be used to study the effect of inhibiting GENSET gene transcription within a cell. Traditionally, homopurine sequences were considered the most useful for triple helix strategies. However, homopyrimidine sequences can also inhibit gene expression. Such homopyrimidine oligonucleotides bind to the major groove at homopurine:homopyrimidine sequences. Thus, both types of sequences from the GENSET genomic DNA are contemplated within the scope of this invention.

[1012] To carry out gene therapy strategies using the triple helix approach, the sequences of the GENSET genomic DNA are first scanned to identify 10-mer to 20-mer homopyrimidine or homopurine stretches which could be used in triple-helix based strategies for inhibiting GENSET expression. Following identification of candidate homopyrimidine or homopurine stretches, their efficiency in inhibiting GENSET expression is assessed by introducing varying amounts of oligonucleotides containing the candidate sequences into tissue culture cells which express the GENSET gene.

[1013] The oligonucleotides can be introduced into the cells using a variety of methods known to those skilled in the art, including but not limited to calcium phosphate precipitation, DEAE-Dextran, electroporation, liposome-mediated transfection or native uptake.

[1014] Treated cells are monitored for altered cell function or reduced GENSET expression using techniques such as Northern blotting, RNase protection assays, or PCR based strategies to monitor the transcription levels of the GENSET gene in cells which have been treated with the oligonucleotide. The cell functions to be monitored are predicted based upon the homologies of the target gene corresponding to the cDNA from which the oligonucleotide was derived with known gene sequences that have been associated with a particular function. The cell functions can also be predicted based on the presence of abnormal physiology within cells derived from individuals with a particular inherited disease, particularly when the cDNA is associated with the disease using techniques described in the section entitled “Identification of genes associated with hereditary diseases or drug response”.

[1015] The oligonucleotides which are effective in inhibiting gene expression in tissue culture cells may then be introduced in vivo using the techniques and at a dosage calculated based on the in vitro results, as described in the section entitled “Antisense Approach”.

[1016] In some embodiments, the natural (beta) anomers of the oligonucleotide units can be replaced with alpha anomers to render the oligonucleotide more resistant to nucleases. Further, an intercalating agent such as ethidium bromide, or the like, can be attached to the 3′ end of the alpha oligonucleotide to stabilize the triple helix. For information on the generation of oligonucleotides suitable for triple helix formation see Griffin et al. (1989), which is hereby incorporated by this reference.

Treating GENSET Gene-Related Disorders

[1017] The present invention further relates to methods, uses of GENSET polypeptides and polynucleotides, and uses of modulators of GENSET polypeptides and polynucleotides, for treating diseases/disorders associated with GENSET genes by increasing or decreasing GENSET gene activity and/or expression. These methodologies can be effected using compounds selected using screening protocols such as those described herein and/or by using the gene therapy and antisense approaches described in the art and herein. Gene therapy can be used to effect targeted expression of GENSET genes in any tissue, e.g. a tissue associated with the disease or condition to be treated. The GENSET coding sequence can be cloned into an appropriate expression vector and targeted to a particular cell type(s) to achieve efficient, high level expression. Introduction of the GENSET coding sequence into target cells can be achieved, for example, using particle mediated DNA delivery, (Haynes, 1996 and Maurer, 1999), direct injection of naked DNA, (Levy et al., 1996; and Feigner, 1996), or viral vector mediated transport (Smith et al., 1996, Stone et al, 2000; Wu and Atai, 2000), each of which disclosures are hereby incorporated by reference in their entireties. Tissue specific effects can be achieved, for example, in the case of virus mediated transport by using viral vectors that are tissue specific, or by the use of promoters that are tissue specific. For instance, any tissue-specific promoter may be used to achieve specific expression, for example albumin promoters (liver specific; Pinkert et al., 1987 Genes Dev. 1:268-277), lymphoid specific promoters (Calame et al., 1988 Adv. Immunol. 43:235-275), promoters of T-cell receptors (Winoto et al., 1989 EMBO J. 8:729-733) and immunoglobulins (Banerji et al., 1983 Cell 33:729-740; Queen and Baltimore 1983 Cell 33:741-748), neuron-specific promoters (e.g. the neurofilament promoter; Byrne et al., 1989 Proc. Natl. Acad. Sci. USA 86:5473-5477), pancreas-specific promoters (Edlunch et al., 1985 Science 230:912-916) or mammary gland-specific promoters (milk whey promoter, U.S. Pat. No. 4,873,316 and European Application Publication No. 264, 166). Developmentally-regulated promoters can also be used, such as the murine homeobox promoters (Kessel et al., 1990 Science 249:374-379) or the alpha-fetoprotein promoter (Campes et al., 1989 Genes Dev. 3:537-546).

[1018] Combinatorial approaches can also be used to ensure that the GENSET coding sequence is activated in the target tissue (Butt and Karathanasis, 1995; Miller and Whelan, 1997), which disclosures are hereby incorporated by reference in their entireties. Antisense oligonucleotides complementary to GENSET mRNA can be used to selectively diminish or ablate the expression of the protein, for example, at sites of inflammation. More specifically, antisense constructs or antisense oligonucleotides can be used to inhibit the production of GENSET in high expressing cells such as those cited in the third column of Table V. Antisense mRNA can be produced by transfecting into target cells an expression vector with the GENSET gene sequence, or a portion thereof, oriented in an antisense direction relative to the direction of transcription. Appropriate vectors include viral vectors, including retroviral, adenoviral, and adeno-associated viral vectors, as well as nonviral vectors. Tissue specific promoters can be used, as described supra. Alternatively, antisense oligonucleotides can be introduced directly into target cells to achieve the same goal. (See also other delivery methodologies described herein in connection with gene therapy.). Oligonucleotides can be selected/designed to achieve a high level of specificity (Wagner et al., 1996), which disclosure is hereby incorporated by reference in its entirety. The therapeutic methodologies described herein are applicable to both human and non-human mammals (including cats and dogs).

### Pharmaceutical and Physiologically Acceptable Compositions

[1019] The present invention also relates to pharmaceutical or physiologically acceptable compositions comprising, as active agent, the polypeptides, nucleic acids or antibodies of the invention. The invention also relates to compositions comprising, as active agent, compounds selected using the above-described screening protocols. Such compositions include the active agent in combination with a pharmaceutical or physiologically acceptable carriers. In the case of naked DNA, the “carrier” may be gold particles. The amount of active agent in the composition can vary with the agent, the patient and the effect sought. Likewise, the dosing regimen can vary depending on the composition and the disease/disorder to be treated.

[1020] Therefore, the invention related to methods for the production of pharmaceutical composition comprising a method for selecting an active agent, compound, substance or molecule using any of the screening method described herein and furthermore mixing the identified active agent, compound, substance or molecule with a pharmaceutically acceptable carrier.

[1021] The pharmaceutical compositions utilized in this invention may be administered by any number of routes including, but not limited to, oral, intravenous, intramuscular, intra-arterial, intramedullary, intrathecal, intraventricular, transdermal, subcutaneous, intraperitoneal, intranasal, enteral, topical, sublingual, or rectal means. In addition to the active ingredients, these pharmaceutical compositions may contain suitable pharmaceutically acceptable carriers comprising excipients and auxiliaries which facilitate processing of the active compounds into preparations which can be used pharmaceutically. Further details on techniques for formulation and administration may be found in the latest edition of Remington's Pharmaceutical Sciences (Maack Publishing Co. Easton, Pa.).

[1022] Pharmaceutical compositions for oral administration can be formulated using pharmaceutically acceptable carriers well known in the art in dosages suitable for oral administration. Such carriers enable the pharmaceutical compositions to be formulated as tablets, pills, dragees, capsules, liquids, gels, syrups, slurries, suspensions, and the like, for ingestion by the patient.

[1023] Pharmaceutical preparations for oral use can be obtained through a combination of active compounds with solid excipient, sulting mixture is optionally grinding, and processing the mixture of granules, after adding suitable auxiliaries, if desired, to obtain tablets or dragee cores. Suitable excipients are carbohydrate or protein fillers, such as sugars, including lactose, sucrose, mannitol, or sorbitol; starch from corn, wheat, rice, potato, or other plants; cellulose, such as methyl cellulose, hydroxypropylmethyl-cellulose, or sodium carboxymethylcellulose; gums including arabic and tragacanth; and proteins such as gelatin and collagen. If desired, disintegrating or solubilizing agents may be added, such as the cross-linked polyvinyl pyrrolidone, agar, alginic acid, or a salt thereof, such as sodium alginate.

[1024] Dragee cores may be used in conjunction with suitable coatings, such as concentrated sugar solutions, which may also contain gum arabic, talc, polyvinylpyrrolidone, carbopol gel, polyethylene glycol, and/or titaniumdioxide, lacquer solutions, and suitable organic solvents or solvent mixtures. Dyestuffs or pigments may be added to the tablets or dragee coatings for product identification or to characterize the quantity of active compound, i.e., dosage.

[1025] Pharmaceutical preparations which can be used orally include push-fit capsules made of gelatin, as well as soft, sealed capsules made of gelatin and a coating, such as glycerol or sorbitol. Push-fit capsules can contain active ingredients mixed with a filler or binders, such as lactose or starches, lubricants, such as talc or magnesium stearate, and, optionally, stabilizers. In soft capsules, the active compounds may be dissolved or suspended in suitable liquids, such as fatty oils, liquid, or liquidpolyethylene glycol with or without stabilizers.

[1026] Pharmaceutical formulations suitable for parenteral administration may be formulated in aqueous solutions, preferably in physiologically compatible buffers such as Hanks solution, Ringer's solution, or physiologically buffered saline. Aqueous injection suspensions may contain substances which increase the viscosity of the suspension, such as sodium carboxymethylcellulose, sorbitol, or dextran. Additionally, suspensions of the active compounds may be prepared as appropriate oily injection suspensions. Suitable lipophilic solvents or vehicles include fatty oils such as sesame oil, or synthetic fatty acid esters, such as ethyl oleate or triglycerides, or liposomes. Optionally, the suspension may also contain suitable stabilizers or agents which increase the solubility of the compounds to allow for the preparation of highly concentrated solutions.

[1027] For topical or nasal administration, penetrants appropriate to the particular barrier to be permeated are used in the formulation. Such penetrants are generally known in the art.

[1028] The pharmaceutical compositions of the present invention may be manufactured in a manner that is known in the art, e.g., by means of conventional mixing, dissolving, granulating, dragee-making, levigating, emulsifying, encapsulating, entrapping, or lyophilizing processes.

[1029] The pharmaceutical composition may be provided as a salt and can be formed with many acids, including but not limited to, hydrochloric, sulfuric, acetic, lactic, tartaric, malic, succinic, etc. Salts tend to be more soluble in aqueous or other protonic solvents than are the corresponding free base forms. In other cases, the preferred preparation may be a lyophilized powder which may contain any or all of the following: 1-50 mM histidine, 0.1%-2% sucrose, and 2-7% mannitol, at a pH range of 4.5 to 5.5, that is combined with buffer prior to use.

[1030] After pharmaceutical compositions have been prepared, they can be placed in an appropriate container and labeled for treatment of an indicated condition. For administration of a GENSET polypeptide, such labeling would include amount, frequency, and method of administration.

[1031] Pharmaceutical compositions suitable for use in the invention include compositions wherein the active ingredients are contained in an effective amount to achieve the intended purpose. The determination of an effective dose is well within the capability of those skilled in the art.

[1032] For any compound, the therapeutically effective dose can be estimated initially either in cell culture assays, e.g., of neoplastic cells, or in animal models, usually mice, rabbits, dogs, or pigs. The animal model may also be used to determine the appropriate concentration range and route of administration. Such information can then be used to determine useful doses and routes for administration in humans.

[1033] A therapeutically effective dose refers to that amount of active ingredient, for example a GENSET polypeptide or fragments thereof, antibodies specific to GENSET polypeptides, agonists, antagonists or inhibitors of GENSET polypeptides, which ameliorates the symptoms or condition. Therapeutic efficacy and toxicity may be determined by standard pharmaceutical procedures in cell cultures or experimental animals, e.g., ED50 (the dose therapeutically effective in 50% of the population) and LD50 (the dose lethal to 50% of the population). The dose ratio between therapeutic and toxic effects is the therapeutic index, and it can be expressed as the ratio, LD50/ED50. Pharmaceutical compositions which exhibit large therapeutic indices are preferred. The data obtained from cell culture assays and animal studies is used in formulating a range of dosage for human use. The dosage contained in such compositions is preferably within a range of circulating concentrations that include the ED50 with little or no toxicity. The dosage varies within this range depending upon the dosage form employed, sensitivity of the patient, and the route of administration.

[1034] The exact dosage will be determined by the practitioner, in light of factors related to the subject that requires treatment. Dosage and administration are adjusted to provide sufficient levels of the active moiety or to maintain the desired effect. Factors which may be taken into account include the severity of the disease state, general health of the subject, age, weight, and gender of the subject, diet, time and frequency of administration, drug combination(s), reaction sensitivities, and tolerance/response to therapy. Long-acting pharmaceutical compositions maybe administered every 3 to 4 days, every week, or once every two weeks depending on half-life and clearance rate of the particular formulation.

[1035] Normal dosage amounts may vary from 0.1 to 100,000 micrograms, up to a total dose of about 1 g, depending upon the route of administration. Guidance as to particular dosages and methods of delivery is provided in the literature and generally available to practitioners in the art. Those skilled in the art will employ different formulations for nucleotides than for proteins or their inhibitors. Similarly, delivery of polynucleotides or polypeptides will be specific to particular cells, conditions, locations, etc.

### Use of Genset Sequences: Computer-Related Embodiments

[1036] As used herein the term “cDNA codes of SEQ ID NOs:1-169, 339455, 561-784” encompasses the nucleotide sequences of SEQ ID NOs:1-169, 339-455, 561-784 and of clones inserts of the deposited clone pool, fragments thereof, nucleotide sequences homologous thereto, and sequences complementary to all of the preceding sequences. The fragments include fragments of SEQ ID NOs:1-169, 339-455, 561-784 comprising at least 8, 10, 12, 15, 18, 20, 25, 28, 30, 35, 40, 50, 75, 100, 150, 200, 300, 400, 500, 1000 or 2000 consecutive nucleotides of SEQ ID NOs:1-169, 339-455, 561-784. Preferably the fragments include polynucleotides described herein as encoding polypeptides having a biological activity. Homologous sequences and fragments of SEQ ID NOs:1-169, 339-455, 561-784 refer to a sequence having at least 99%, 98%, 97%, 96%, 95%, 90%, 85%, 80%, or 75% identity to these sequences. Identity may be determined using any of the computer programs and parameters described herein, including BLAST2N with the default parameters or with any modified parameters. Homologous sequences also include RNA sequences in which uridines replace the thymines in the cDNA codes of SEQ ID NOs:1-169, 339-455, 561-784. The homologous sequences may be obtained using any of the procedures described herein or may result from the correction of a sequencing error as described above. It will be appreciated that the cDNA codes of SEQ ID NOs:1-169, 339-455, 561-784 can be represented in the traditional single character format (see, e.g. the inside back cover of Stryer, 1995) or in any other format which records the identity of the nucleotides in a sequence.

[1037] As used herein the term “polypeptide codes of SEQ ID NOs:170-338, 456-560, 785-918” encompasses the polypeptide sequences of SEQ ID NOs:170-338, 456-560, 785-918 which are encoded by the cDNAs of SEQ ID NOs:1-169, 339-455, 561-784, the polypeptide sequences encoded by the clone inserts of the deposited clone pool, polypeptide sequences homologous thereto, or fragments of any of the preceding sequences. Homologous polypeptide sequences refer to a polypeptide sequence having at least 99%, 98%, 97%, 96%, 95%, 90%, 85%, 80%, 75% identity to one of the polypeptide sequences of SEQ ID NOs:170-338, 456-560, 785-918. Identity may be determined using any of the computer programs and parameters described herein, including FASTA with the default parameters or with any modified parameters. The homologous sequences may be obtained using any of the procedures described herein or may result from the correction of a sequencing error as described above. The polypeptide fragments comprise at least 5, 6, 8, 10, 12, 15, 20, 25, 30, 35, 40, 50, 60, 75, 100, 150 or 200 consecutive amino acids of the polypeptides of SEQ ID NOs:170-338, 456-560, 785-918. Preferably, the fragments include polypeptides described herein as having a biological activity, or fragments comprising at least 5, 10, 15, 20, 25, 30, 35, 40, 50, 75, 100, or 150 consecutive amino acids of polypeptides described herein as having a biological activity. It will be appreciated that the polypeptide codes of the SEQ ID NOs: 170-338, 456-560, 785-918 can be represented in the traditional single character format or three letter format (see, the inside back cover of Stryer, 1995) or in any other format which relates the identity of the polypeptides in a sequence.

[1038] It will be appreciated by those skilled in the art that the nucleic acid codes of the invention and polypeptide codes of the invention can be stored, recorded, and manipulated on any medium which can be read and accessed by a computer. As used herein, the words “recorded” and “stored” refer to a process for storing information on a computer medium. A skilled artisan can readily adopt any of the presently known methods for recording information on a computer readable medium to generate manufactures comprising one or more of the nucleic acid codes of the invention, or one or more of the polypeptide codes of the invention. Another aspect of the present invention is a computer readable medium having recorded thereon at least 2, 5, 10, 15, 20, 25, 30, or 50 nucleic acid codes of the invention. Another aspect of the present invention is a computer readable medium having recorded thereon at least 2, 5, 10, 15, 20, 25, 30, or 50 polypeptide codes of the invention.

[1039] Computer readable media include magnetically readable media, optically readable media, electronically readable media and magnetic/optical media. For example, the computer readable media may be a hard disk, a floppy disk, a magnetic tape, CD-ROM, Digital Versatile Disk (DVD), Random Access Memory (RAM), or Read Only Memory (ROM) as well as other types of other media known to those skilled in the art.

[1040] Embodiments of the present invention include systems, particularly computer systems which store and manipulate the sequence information described herein. One example of a computer system 100 is illustrated in block diagram form in FIG. 1. As used herein, “a computer system” refers to the hardware components, software components, and data storage components used to analyze the nucleotide sequences of the nucleic acid codes of the invention or the amino acid sequences of the polypeptide codes of the invention. In one embodiment, the computer system 100 is a Sun Enterprise 1000 server (Sun Microsystems, Palo Alto, Calif.). The computer system 100 preferably includes a processor for processing, accessing and manipulating the sequence data. The processor 105 can be any well-known type of central processing unit, such as the Pentium III from Intel Corporation, or similar processor from Sun, Motorola, Compaq or International Business Machines.

[1041] Preferably, the computer system 100 is a general purpose system that comprises the processor 105 and one or more internal data storage components 110 for storing data, and one or more data retrieving devices for retrieving the data stored on the data storage components. A skilled artisan can readily appreciate that any one of the currently available computer systems are suitable.

[1042] In one particular embodiment, the computer system 100 includes a processor 105 connected to a bus which is connected to a main memory 115 (preferably implemented as RAM) and one or more internal data storage devices 110, such as a hard drive and/or other computer readable media having data recorded thereon. In some embodiments, the computer system 100 further includes one or more data retrieving device 118 for reading the data stored on the internal data storage devices 110.

[1043] The data retrieving device 118 may represent, for example, a floppy disk drive, a compact disk drive, a magnetic tape drive, etc. In some embodiments, the internal data storage device 110 is a removable computer readable medium such as a floppy disk, a compact disk, a magnetic tape, etc. containing control logic and/or data recorded thereon. The computer system 100 may advantageously include or be programmed by appropriate software for reading the control logic and/or the data from the data storage component once inserted in the data retrieving device.

[1044] The computer system 100 includes a display 120 which is used to display output to a computer user. It should also be noted that the computer system 100 can be linked to other computer systems 125a-c in a network or wide area network to provide centralized access to the computer system 100.

[1045] Software for accessing and processing the nucleotide sequences of the nucleic acid codes of the invention or the amino acid sequences of the polypeptide codes of the invention (such as search tools, compare tools, and modeling tools etc.) may reside in main memory 115 during execution.

[1046] In some embodiments, the computer system 100 may further comprise a sequence comparer for comparing the above-described nucleic acid codes of the invention or the polypeptide codes of the invention stored on a computer readable medium to reference nucleotide or polypeptide sequences stored on a computer readable medium. A “sequence comparer” refers to one or more programs which are implemented on the computer system 100 to compare a nucleotide or polypeptide sequence with other nucleotide or polypeptide sequences and/or compounds including but not limited to peptides, peptidomimetics, and chemicals stored within the data storage means. For example, the sequence comparer may compare the nucleotide sequences of nucleic acid codes of the invention or the amino acid sequences of the polypeptide codes of the invention stored on a computer readable medium to reference sequences stored on a computer readable medium to identify homologies, motifs implicated in biological function, or structural motifs. The various sequence comparer programs identified elsewhere in this patent specification are particularly contemplated for use in this aspect of the invention.

[1047] FIG. 2 is a flow diagram illustrating one embodiment of a process 200 for comparing a new nucleotide or protein sequence with a database of sequences in order to determine the homology levels between the new sequence and the sequences in the database. The database of sequences can be a private database stored within the computer system 100, or a public database such as GENBANK, PIR OR SWISSPROT that is available through the Internet.

[1048] The process 200 begins at a start state 201 and then moves to a state 202 wherein the new sequence to be compared is stored to a memory in a computer system 100. As discussed above, the memory could be any type of memory, including RAM or an internal storage device.

[1049] The process 200 then moves to a state 204 wherein a database of sequences is opened for analysis and comparison. The process 200 then moves to a state 206 wherein the first sequence stored in the database is read into a memory on the computer. A comparison is then performed at a state 210 to determine if the first sequence is the same as the second sequence. It is important to note that this step is not limited to performing an exact comparison between the new sequence and the first sequence in the database. Well-known methods are known to those of skill in the art for comparing two nucleotide or protein sequences, even if they are not identical. For example, gaps can be introduced into one sequence in order to raise the homology level between the two tested sequences. The parameters that control whether gaps or other features are introduced into a sequence during comparison are normally entered by the user of the computer system.

[1050] Once a comparison of the two sequences has been performed at the state 210, a determination is made at a decision state 210 whether the two sequences are the same. Of course, the term “same” is not limited to sequences that are absolutely identical. Sequences that are within the homology parameters entered by the user will be marked as “same” in the process 200.

[1051] If a determination is made that the two sequences are the same, the process 200 moves to a state 214 wherein the name of the sequence from the database is displayed to the user. This state notifies the user that the sequence with the displayed name fulfills the homology constraints that were entered. Once the name of the stored sequence is displayed to the user, the process 200 moves to a decision state 218 wherein a determination is made whether more sequences exist in the database. If no more sequences exist in the database, then the process 200 terminates at an end state 220. However, if more sequences do exist in the database, then the process 200 moves to a state 224 wherein a pointer is moved to the next sequence in the database so that it can be compared to the new sequence. In this manner, the new sequence is aligned and compared with every sequence in the database.

[1052] It should be noted that if a determination had been made at the decision state 212 that the sequences were not homologous, then the process 200 would move immediately to the decision state 218 in order to determine if any other sequences were available in the database for comparison.

[1053] Accordingly, one aspect of the present invention is a computer system comprising a processor, a data storage device having stored thereon a nucleic acid code of the invention or a polypeptide code of the invention, a data storage device having retrievably stored thereon reference nucleotide sequences or polypeptide sequences to be compared to the nucleic acid code of the invention or polypeptide code of the invention and a sequence comparer for conducting the comparison. The sequence comparer may indicate a homology level between the sequences compared or identify motifs implicated in biological function and structural motifs in the nucleic acid code of the invention and polypeptide codes of the invention or it may identify structural motifs in sequences which are compared to these nucleic acid codes and polypeptide codes. In some embodiments, the data storage device may have stored thereon the sequences of at least 2, 5, 10, 15, 20, 25, 30, or 50 of the nucleic acid codes of the invention or polypeptide codes of the invention.

[1054] Another aspect of the present invention is a method for determining the level of homology between a nucleic acid code of the invention and a reference nucleotide sequence, comprising the steps of reading the nucleic acid code and the reference nucleotide sequence through the use of a computer program which determines homology levels and determining homology between the nucleic acid code and the reference nucleotide sequence with the computer program. The computer program may be any of a number of computer programs for determining homology levels, including those specifically enumerated herein, including BLAST2N with the default parameters or with any modified parameters. The method may be implemented using the computer systems described above. The method may also be performed by reading 2, 5, 10, 15, 20, 25, 30, or 50 of the above described nucleic acid codes of the invention through the use of the computer program and determining homology between the nucleic acid codes and reference nucleotide sequences.

[1055] FIG. 3 is a flow diagram illustrating one embodiment of a process 250 in a computer for determining whether two sequences are homologous. The process 250 begins at a start state 252 and then moves to a state 254 wherein a first sequence to be compared is stored to a memory. The second sequence to be compared is then stored to a memory at a state 256. The process 250 then moves to a state 260 wherein the first character in the first sequence is read and then to a state 262 wherein the first character of the second sequence is read. It should be understood that if the sequence is a nucleotide sequence, then the character would normally be either A, T, C, G or U. If the sequence is a protein sequence, then it should be in the single letter amino acid code so that the first and sequence sequences can be easily compared.

[1056] A determination is then made at a decision state 264 whether the two characters are the same. If they are the same, then the process 250 moves to a state 268 wherein the next characters in the first and second sequences are read. A determination is then made whether the next characters are the same. If they are, then the process 250 continues this loop until two characters are not the same. If a determination is made that the next two characters are not the same, the process 250 moves to a decision state 274 to determine whether there are any more characters either sequence to read.

[1057] If there are no more characters to read, then the process 250 moves to a state 276 wherein the level of homology between the first and second sequences is displayed to the user. The level of homology is determined by calculating the proportion of characters between the sequences that were the same out of the total number of sequences in the first sequence. Thus, if every character in a first 100 nucleotide sequence aligned with a every character in a second sequence, the homology level would be 100%.

[1058] Alternatively, the computer program may be a computer program which compares the nucleotide sequences of the nucleic acid codes of the present invention, to reference nucleotide sequences in order to determine whether the nucleic acid code of the invention differs from a reference nucleic acid sequence at one or more positions. Optionally such a program records the length and identity of inserted, deleted or substituted nucleotides with respect to the sequence of either the reference polynucleotide or the nucleic acid code of the invention. In one embodiment, the computer program may be a program which determines whether the nucleotide sequences of the nucleic acid codes of the invention contain one or more single nucleotide polymorphisms (SNP) with respect to a reference nucleotide sequence. These single nucleotide polymorphisms may each comprise a single base substitution, insertion, or deletion.

[1059] Another aspect of the present invention is a method for determining the level of homology between a polypeptide code of the invention and a reference polypeptide sequence, comprising the steps of reading the polypeptide code of the invention and the reference polypeptide sequence through use of a computer program which determines homology levels and determining homology between the polypeptide code and the reference polypeptide sequence using the computer program.

[1060] Accordingly, another aspect of the present invention is a method for determining whether a nucleic acid code of the invention differs at one or more nucleotides from a reference nucleotide sequence comprising the steps of reading the nucleic acid code and the reference nucleotide sequence through use of a computer program which identifies differences between nucleic acid sequences and identifying differences between the nucleic acid code and the reference nucleotide sequence with the computer program. In some embodiments, the computer program is a program which identifies single nucleotide polymorphisms. The method may be implemented by the computer systems described above and the method illustrated in FIG. 3. The method may also be performed by reading at least 2, 5, 10, 15, 20, 25, 30, or 50 of the nucleic acid codes of the invention and the reference nucleotide sequences through the use of the computer program and identifying differences between the nucleic acid codes and the reference nucleotide sequences with the computer program.

[1061] In other embodiments the computer based system may further comprise an identifier for identifying features within the nucleotide sequences of the nucleic acid codes of the invention or the amino acid sequences of the polypeptide codes of the invention. An “identifier” refers to one or more programs which identifies certain features within the above-described nucleotide sequences of the nucleic acid codes of the invention or the amino acid sequences of the polypeptide codes of the invention. In one embodiment, the identifier may comprise a program which identifies an open reading frame in the cDNAs codes of the invention.

[1062] FIG. 4 is a flow diagram illustrating one embodiment of an identifier process 300 for detecting the presence of a feature in a sequence. The process 300 begins at a start state 302 and then moves to a state 304 wherein a first sequence that is to be checked for features is stored to a memory 115 in the computer system 100. The process 300 then moves to a state 306 wherein a database of sequence features is opened. Such a database would include a list of each feature's attributes along with the name of the feature. For example, a feature name could be “Initiation Codon” and the attribute would be “ATG”. Another example would be the feature name “TAATAA Box” and the feature attribute would be “TAATAA”. An example of such a database is produced by the University of Wisconsin Genetics Computer Group (www.gcg.com).

[1063] Once the database of features is opened at the state 306, the process 300 moves to a state 308 wherein the first feature is read from the database. A comparison of the attribute of the first feature with the first sequence is then made at a state 310. A determination is then made at a decision state 316 whether the attribute of the feature was found in the first sequence. If the attribute was found, then the process 300 moves to a state 318 wherein the name of the found feature is displayed to the user.

[1064] The process 300 then moves to a decision state 320 wherein a determination is made whether move features exist in the database. If no more features do exist, then the process 300 terminates at an end state 324. However, if more features do exist in the database, then the process 300 reads the next sequence feature at a state 326 and loops back to the state 310 wherein the attribute of the next feature is compared against the first sequence.

[1065] It should be noted, that if the feature attribute is not found in the first sequence at the decision state 316, the process 300 moves directly to the decision state 320 in order to determine if any more features exist in the database.

[1066] In another embodiment, the identifier may comprise a molecular modeling program which determines the 3-dimensional structure of the polypeptides codes of the invention. Such programs may use any methods known to those skilled in the art including methods based on homology-modeling, fold recognition and ab initio methods as described in Sternberg et al., 1999, which disclosure is hereby incorporated by reference in its entirety. In some embodiments, the molecular modeling program identifies target sequences that are most compatible with profiles representing the structural environments of the residues in known three-dimensional protein structures. (See, e.g., Eisenberg et al., U.S. Pat. No. 5,436,850 issued Jul. 25, 1995, which disclosure is hereby incorporated by reference in its entirety). In another technique, the known three-dimensional structures of proteins in a given family are superimposed to define the structurally conserved regions in that family. This protein modeling technique also uses the known three-dimensional structure of a homologous protein to approximate the structure of the polypeptide codes of the invention. (See e.g., Srinivasan, et al., U.S. Pat. No. 5,557,535 issued Sep. 17, 1996, which disclosure is hereby incorporated by reference in its entirety). Conventional homology modeling techniques have been used routinely to build models of proteases and antibodies. (Sowdhamini et al., (1997)). Comparative approaches can also be used to develop three-dimensional protein models when the protein of interest has poor sequence identity to template proteins. In some cases, proteins fold into similar three-dimensional structures despite having very weak sequence identities. For example, the three-dimensional structures of a number of helical cytokines fold in similar three-dimensional topology in spite of weak sequence homology.

[1067] The recent development of threading methods now enables the identification of likely folding patterns in a number of situations where the structural relatedness between target and template(s) is not detectable at the sequence level. Hybrid methods, in which fold recognition is performed using Multiple Sequence Threading (MST), structural equivalencies are deduced from the threading output using a distance geometry program DRAGON to construct a low resolution model, and a full-atom representation is constructed using a molecular modeling package such as QUANTA.

[1068] According to this 3-step approach, candidate templates are first identified by using the novel fold recognition algorithm MST, which is capable of performing simultaneous threading of multiple aligned sequences onto one or more 3-D structures. In a second step, the structural equivalencies obtained from the MST output are converted into interresidue distance restraints and fed into the distance geometry program DRAGON, together with auxiliary information obtained from secondary structure predictions. The program combines the restraints in an unbiased manner and rapidly generates a large number of low resolution model confirmations. In a third step, these low resolution model confirmations are converted into full-atom models and subjected to energy minimization using the molecular modeling package QUANTA. (See e.g., Aszódi et al., (1997)).

[1069] The results of the molecular modeling analysis may then be used in rational drug design techniques to identify agents which modulate the activity of the polypeptide codes of the invention.

[1070] Accordingly, another aspect of the present invention is a method of identifying a feature within the nucleic acid codes of the invention or the polypeptide codes of the invention comprising reading the nucleic acid code(s) or the polypeptide code(s) through the use of a computer program which identifies features therein and identifying features within the nucleic acid code(s) or polypeptide code(s) with the computer program. In one embodiment, computer program comprises a computer program which identifies open reading frames. In a further embodiment, the computer program identifies linear or structural motifs in a polypeptide sequence. In another embodiment, the computer program comprises a molecular modeling program. The method may be performed by reading a single sequence or at least 2, 5, 10, 15, 20, 25, 30, or 50 of the nucleic acid codes of the invention or the polypeptide codes of the invention through the use of the computer program and identifying features within the nucleic acid codes or polypeptide codes with the computer program.

[1071] The nucleic acid codes of the invention or the polypeptide codes of the invention may be stored and manipulated in a variety of data processor programs in a variety of formats. For example, they may be stored as text in a word processing file, such as MicrosoftWORD or WORDPERFECT or as an ASCII file in a variety of database programs familiar to those of skill in the art, such as DB2, SYBASE, or ORACLE. In addition, many computer programs and databases may be used as sequence comparers, identifiers, or sources of reference nucleotide or polypeptide sequences to be compared to the nucleic acid codes of the invention or the polypeptide codes of the invention. The following list is intended not to limit the invention but to provide guidance to programs and databases which are useful with the nucleic acid codes of the invention or the polypeptide codes of the invention. The programs and databases which may be used include, but are not limited to: MacPattern (EMBL), DiscoveryBase (Molecular Applications Group), GeneMine (Molecular Applications Group), Look (Molecular Applications Group), MacLook (Molecular Applications Group), BLAST and BLAST2 (NCBI), BLASTN and BLASTX (Altschul et al, 1990), FASTA (Pearson and Lipman, 1988), FASTDB (Brutlag et al., 1990), Catalyst (Molecular Simulations Inc.), Catalyst/SRAPE (Molecular Simulations Inc.), Cerius2.DBAccess (Molecular Simulations Inc.), HypoGen (Molecular Simulations Inc.), Insight II, (Molecular Simulations Inc.), Discover (Molecular Simulations Inc.), CHARMm (Molecular Simulations Inc.), Felix (Molecular Simulations Inc.), DelPhi, (Molecular Simulations Inc.), QuanteMM, (Molecular Simulations Inc.), Homology (Molecular Simulations Inc.), Modeler (Molecular Simulations Inc.), ISIS (Molecular Simulations Inc.), Quanta/Protein Design (Molecular Simulations Inc.), WebLab (Molecular Simulations Inc.), WebLab Diversity Explorer (Molecular Simulations Inc.), Gene Explorer (Molecular Simulations Inc.), SeqFold (Molecular Simulations Inc.), the EMBL/Swissprotein database, the MDL Available Chemicals Directory database, the MDL Drug Data Report data base, the Comprehensive Medicinal Chemistry database, Derwents's World Drug Index database, the BioByteMasterFile database, the Genbank database, and the Genseqn database. Many other programs and data bases would be apparent to one of skill in the art given the present disclosure.

[1072] Motifs which may be detected using the above programs include sequences encoding leucine zippers, helix-turn-helix motifs, glycosylation sites, ubiquitination sites, alpha helices, and beta sheets, signal sequences encoding signal peptides which direct the secretion of the encoded proteins, sequences implicated in transcription regulation such as homeoboxes, acidic stretches, enzymatic active sites, substrate binding sites, and enzymatic cleavage sites.

### CONCLUSION

[1073] As discussed above, the GENSET polynucleotides and polypeptides of the present invention or fragments thereof can be used for various purposes. The polynucleotides can be used to express recombinant protein for analysis, characterization or therapeutic use; as markers for tissues in which the corresponding protein is preferentially expressed (either constitutively or at a particular stage of tissue differentiation or development or in disease states); as molecular weight markers on Southern gels; as chromosome markers or tags (when labeled) to identify chromosomes or to map related gene positions; as a reagent (including a labeled reagent) in assays designed to quantitatively determine levels of GENSET expression in biological samples; to compare with endogenous DNA sequences in patients to identify potential genetic disorders; as probes to hybridize and thus discover novel, related DNA sequences; as a source of information to derive PCR primers for genetic fingerprinting; for selecting and making oligomers for attachment to a “gene chip” or other support, including for examination for expression patterns; to raise anti-protein antibodies using DNA immunization techniques; and as an antigen to raise anti-DNA antibodies or elicit another immune response. Where the polynucleotide encodes a protein which binds or potentially binds to another protein (such as, for example, in a receptor-ligand interaction), the polynucleotide can also be used in interaction trap assays (such as, for example, that described in Gyuris et al., (1993) to identify polynucleotides encoding the other protein with which binding occurs or to identify inhibitors of the binding interaction.

[1074] The proteins or polypeptides provided by the present invention can similarly be used in assays to determine biological activity, including in a panel of multiple proteins for high-throughput screening; to raise antibodies or to elicit another immune response; as a reagent (including the labeled reagent) in assays designed to quantitatively determine levels of the protein (or its receptor) in biological fluids; as markers for tissues in which the corresponding protein is preferentially expressed (either constitutively or at a particular stage of tissue differentiation or development or in a disease state); and, of course, to isolate correlative receptors or ligands. Where the protein binds or potentially binds to another protein (such as, for example, in a receptor-ligand interaction), the protein can be used to identify the other protein with which binding occurs or to identify inhibitors of the binding interaction. Proteins involved in these binding interactions can also be used to screen for peptide or small molecule inhibitors or agonists of the binding interaction.

[1075] Any or all of these research utilities are capable of being developed into reagent grade or kit format for commercialization as research products.

[1076] Methods for performing the uses listed above are well known to those skilled in the art. References disclosing such methods include without limitation “Molecular Cloning; A Laboratory Manual”, 2d ed., Cole Spring Harbor Laboratory Press, Sambrook, J., E. F. Fritsch and T. Maniatis eds., 1989, and “Methods in Enzymology; Guide to Molecular Cloning Techniques”, Academic Press, Berger and Kimmel eds., 1987, which disclosures are hereby incorporated by reference in their entireties.

[1077] Polynucleotides and proteins of the present invention can also be used as nutritional sources or supplements. Such uses include without limitation use as a protein or amino acid supplement, use as a carbon source, use as a nitrogen source and use as a source of carbohydrate. In such cases the protein or polynucleotide of the invention can be added to the feed of a particular organism or can be administered as a separate solid or liquid preparation, such as in the form of powder, pills, solutions, suspensions or capsules. In the case of microorganisms, the protein or polynucleotide of the invention can be added to the medium in or on which the microorganism is cultured.

[1078] Although this invention has been described in terms of certain preferred embodiments, other embodiments which will be apparent to those of ordinary skill in the art in view of the disclosure herein are also within the scope of this invention. Accordingly, the scope of the invention is intended to be defined only by reference to the appended claims.

### EXAMPLES

Preparation of Antibody Compositions to the GENSET Protein

[1079] Substantially pure protein or polypeptide is isolated from transfected or transformed cells containing an expression vector encoding the GENSET protein or a portion thereof. The concentration of protein in the final preparation is adjusted, for example, by concentration on an Amicon filter device, to the level of a few micrograms/ml. Monoclonal or polyclonal antibody to the protein can then be prepared as follows:

A. Monoclonal Antibody Production by Hybridoma Fusion

[1080] Monoclonal antibody to epitopes in the GENSET protein or a portion thereof can be prepared from murine hybridomas according to the classical method of Kohler and Milstein, (1975) or derivative methods thereof. Also see Harlow and Lane. (1988).

[1081] Briefly, a mouse is repetitively inoculated with a few micrograms of the GENSET protein or a portion thereof over a period of a few weeks. The mouse is then sacrificed, and the antibody producing cells of the spleen isolated. The spleen cells are fused by means of polyethylene glycol with mouse myeloma cells, and the excess unfused cells destroyed by growth of the system on selective media comprising aminopterin (HAT media). The successfully fused cells are diluted and aliquots of the dilution placed in wells of a microtiter plate where growth of the culture is continued. Antibody-producing clones are identified by detection of antibody in the supernatant fluid of the wells by immunoassay procedures, such as ELISA, as originally described by Engvall, (1980), which disclosure is hereby incorporated by reference in its entirety, and derivative methods thereof. Selected positive clones can be expanded and their monoclonal antibody product harvested for use. Detailed procedures for monoclonal antibody production are described in Davis, et al. (1986) Section 21-2.

B. Polyclonal Antibody Production by Immunization

[1082] Polyclonal antiserum containing antibodies to heterogeneous epitopes in the GENSET protein or a portion thereof can be prepared by immunizing suitable non-human animal with the GENSET protein or a portion thereof, which can be unmodified or modified to enhance immunogenicity. A suitable non-human animal is preferably a non-human mammal is selected, usually a mouse, rat, rabbit, goat, or horse. Alternatively, a crude preparation which has been enriched for GENSET concentration can be used to generate antibodies. Such proteins, fragments or preparations are introduced into the non-human mammal in the presence of an appropriate adjuvant (e.g. aluminum hydroxide, RIBI, etc.) which is known in the art. In addition the protein, fragment or preparation can be pretreated with an agent which will increase antigenicity, such agents are known in the art and include, for example, methylated bovine serum albumin (mBSA), bovine serum albumin (BSA), Hepatitis B surface antigen, and keyhole limpet hemocyanin (KLH). Serum from the immunized animal is collected, treated and tested according to known procedures. If the serum contains polyclonal antibodies to undesired epitopes, the polyclonal antibodies can be purified by immunoaffinity chromatography.

[1083] Effective polyclonal antibody production is affected by many factors related both to the antigen and the host species. Also, host animals vary in response to site of inoculations and dose, with both inadequate or excessive doses of antigen resulting in low titer antisera. Small doses (ng level) of antigen administered at multiple intradermal sites appears to be most reliable. Techniques for producing and processing polyclonal antisera are known in the art. An effective immunization protocol for rabbits can be found in Vaitukaitis et al. (1971), which disclosure is hereby incorporated by reference in its entirety.

[1084] Booster injections can be given at regular intervals, and antiserum harvested when antibody titer thereof, as determined semi-quantitatively, for example, by double immunodiffusion in agar against known concentrations of the antigen, begins to fall. See, for example, Ouchterlony et al., (1973), which disclosure is hereby incorporated by reference in its entirety. Plateau concentration of antibody is usually in the range of 0.1 to 0.2 mg/ml of serum (about 12 uM). Affinity of the antisera for the antigen is determined by preparing competitive binding curves, as described, for example, by Fisher (1980), which disclosure is hereby incorporated by reference in its entirety.

[1085] Antibody preparations prepared according to either the monoclonal or the polyclonal protocol are useful in quantitative immunoassays which determine concentrations of antigen-bearing substances in biological samples; they are also used semi-quantitatively or qualitatively to identify the presence of antigen in a biological sample. The antibodies may also be used in therapeutic compositions for killing cells expressing the protein or reducing the levels of the protein in the body.

### REFERENCES

[1086] Abbondanzo et al., (1993), Meth. Enzymol., Academic Press, New York, pp 803-823

[1087] Altschul et al., (1990), J. Mol. Biol. 215(3):403410

[1088] Altschul et al., (1993), Nature Genetics 3:266-272

[1089] Altschul et al., (1997), Nuc. Acids Res. 25:3389-3402

[1090] Ames et al., (1995), J. Immunol. Meth. 184:177-186.

[1091] Anton and Graham, (1995), J. Virol., 69: 4600-4606

[1092] Araki et al., (1995) Proc. Natl. Acad. Sci. USA. 92(1):1604.

[1093] Ashkenazi et al., (1991), Proc. Natl. Acad. Sci. USA 88:10535-10539.

[1094] Aszódi et al., (1997) Proteins: Structure, Function, and Genetics, Supplement 1:38-42

[1095] Attwood et al., (1996) Nucleic Acids Res. 24(1):182-8.

[1096] Attwood et al., (2000) Nucleic Acids Res. 28(1):225-7

[1097] Bartunek et al., (1996), Cytokine. 8(1):14-20.

[1098] Bateman et al., (2000) Nucleic Acids Res. 28(1):263-6

[1099] Baubonis (1993) Nucleic Acids Res. 21(9):2025-9.

[1100] Beaucage et al., (1981) Tetrahedron Lett, 22: 1859-1862

[1101] Benham et al. (1989) Genomics 4:509-517,

[1102] Better et al., (1988), Science. 240:1041-1043.

[1103] Bittle et al., (1985), Virol. 66:2347-2354.

[1104] Bowie et al, (1994), Science. 247:1306-1310.

[1105] Bradley (1987), Production and analysis of chimaeric mice. In: E. J. Robertson (Ed.), Teratocarcinomas and embryonic stem cells: A practical approach. IRL Press, Oxford, pp. 113.

[1106] Bram et al., (1993), Mol. Cell Biol., 13: 4760-4769

[1107] Brinkmnan et al., (1995) J. Immunol Methods. 182:41-50.

[1108] Brown et al., (1979) Meth. Enzymol. 68:109-151

[1109] Brutlag et al. (1990) Comp. App. Biosci. 6:237-245

[1110] Bucher and Bairoch (1994) Proceedings 2nd International Conference on Intelligent Systems for Molecular Biology. Altman et al, Eds., pp 53-61, AAAIPress, Menlo Park.

[1111] Burton et al. (1994), Adv. Immunol. 57:191-280

[1112] Bush et al., (1997), J. Chromatogr., 777 : 311-328.

[1113] Butt and Karathanasis (1995) Gene Expr. 4(6):3 19-36.

[1114] Carlson et al., (1997), J. Biol. Chem. 272(17):11295-11301.

[1115] Chai et al., (1993) Biotechnol. Appl. Biochem. 18:259-273.

[1116] Chang et al., (1993) Gene 127:95-8

[1117] Chee et al., (1996) Science. 274:610-614.

[1118] Chen et al. (1987) Mol. Cell. Biol. 7:2745-2752.

[1119] Chen et al., (1998), Cancer Res. 58(16):3668-3678.

[1120] Cherif et al., (1990) Proc. Natl. Acad. Sci. U.S.A., 87:6639-6643

[1121] Cho et al., (1998), Proc. Natl. Acad. Sci. USA, 95(7): 3752-3757.

[1122] Chou, (1989), Mol. Endocrinol. 3: 1511-1514.

[1123] Chow et al., ( 1985), Proc. Natl. Acad. Sci. USA. 82:910-914.

[1124] Cleland et al., (1993), Crit. Rev. Therapeutic Drug Carrier Systems. 10:307-377.

[1125] Coles et al., (1998) Hum Mol Genet 7:791-800

[1126] Compton (1991) Nature 350(6313):91-92.

[1127] Corpet et al. (2000) Nucleic Acids Res. 28(1):267-9

[1128] Cox et al., (1990) Science 250:245-250

[1129] Creighton (1983), Proteins: Structures and Molecular Principles, W. H. Freeman & Co. 2nd Ed., T. E., New York

[1130] Creighton, (1993), Posttranslational Covalent Modification of Proteins, W. H. Freeman and Company, New York B. C. Johnson, Ed., Academic Press, New York 1-12

[1131] Cunningham et al. (1989), Science 244:1081-1085.

[1132] Davis et al., (1986) Basic Methods in Molecular Biology, ed., Elsevier Press, NY, Decker and Parker, (1995) Curr. Opin. Cell. Biol. 7(3) :368-92

[1133] Dempsteret al., (1977) Stat. Soc., 39B:1-38.

[1134] Deng et al., (1998) Blood. 92(6):1981-1988.

[1135] Dent and Latchman (1993) The DNA mobility shift assay. In: Transcription Factors: A Practical Approach (Latchman D S, ed.) pp1-26. Oxford: IRL Press

[1136] Derrigo et al., (2000) Int. J. Mol. Med. 5(2) :111-23

[1137] Eckner et a., (1991) EMBO J. 10:3513-3522.

[1138] Edwards and Leatherbarrow, (1997) Analytical Biochemistry, 246, 1-6

[1139] Engvall, (1980) Meth. Enzymol. 70:419

[1140] Erlich, (1992) PCR Technology; Principles and Applications for DNA Amplification. W. H. Freeman and Co., New York

[1141] Feldman and Steg, (1996), Medecine/Sciences, 12:47-55

[1142] Feigner (1996) Hum Gene Ther. 7(15):1791-3.

[1143] Felici, (1991), J. Mol. Biol., 222:301-310

[1144] Fell et al, (1991), J. Immunol. 146:2446-2452.

[1145] Fields and Song, (1989), Nature, 340: 245-246

[1146] Fisher, (1980) Chap. 42 in: Manual of Clinical Immunology, 2d Ed. (Rose and Friedman, Eds.) Amer. Soc. For Microbiol., Washington, D.C.

[1147] Flotte et al, (1992) Am. J. Respir. Cell Mol. Biol. 7:349-356.

[1148] Fodor et al., (1991) Science 251:767-777.

[1149] Foster et al., (1996) Genomics 33:185-192

[1150] Fountoulakis et al, (1995) Biochem. 270:3958-3964.

[1151] Fraley et al, (1979) Proc. Natl. Acad. Sci. USA. 76:3348-3352.

[1152] Frazer et al., (1992) Genomics 14:574-584

[1153] Fried and Crothers, (1981) Nucleic Acids Res. 9:6505-6525

[1154] Fromont-Racine et al., (1997), Nature Genetics, 16(3): 277-282.

[1155] Fry et al., (1992) Biotechniques, 13: 124-131

[1156] Fudenberg, (1980) Chap. 26 in: Basic 503 Clinical Immunology, 3rd Ed. Lange, Los Altos, Calif.

[1157] Fuller S. A. et al. (1996) Immunology in Current Protocols in Molecular Biology,

[1158] Furth P. A. et al. (1994) Proc. Natl. Acad. Sci USA. 91:9302-9306.

[1159] Garner and Revzin, (1981) Nucleic Acids Res 9:3047-3060

[1160] Gentz et al, (1989) Proc Natl Acad Sci USA. 86(3):821-4.

[1161] Geysen et al., (1984), Proc. Natl. Acad. Sci. U.S.A. 81:3998-4002.

[1162] Ghosh and Bacchawat, (1991), Targeting of liposomes to hepatocytes, IN: Liver Diseases, Targeted diagnosis and therapy using specific rceptors and ligands. Eds., Marcel Dekeker, N.Y. pp. 87-104.

[1163] Gillies et al., (1989), J. Immunol Methods. 125:191-202.

[1164] Gillies et a., (1992), Proc Natl Acad Sci USA 89:1428-1432.

[1165] Gonnet et al., (1992), Science 256:1443-1445

[1166] Gopal (1985) Mol. Cell. Biol., 5:1188-1190.

[1167] Gossen et al., (1992) Proc. Natl. Acad. Sci. USA. 89:5547-5551.

[1168] Gossen et al., (1995) Science. 268:1766-1769.

[1169] Graham et al., (1973) Virol. 52:456-457.

[1170] Green et al., (1986) Ann. Rev. Biochem. 55:569-597

[1171] Greenspan and Bona (1989), FASEB J. 7(5):437-444.

[1172] Griffais et al., (1991) Nucleic Acids Res. 19: 3887-3891

[1173] Griffin et al., (1989) Science 245:967-971

[1174] Gu H. et al., (1993) Cell 73:1155-1164.

[1175] Gu H. et al., (1994) Science 265:103-106.

[1176] Guatelli et al., (1990) Proc. Natl. Acad. Sci. USA. 35:273-286.

[1177] Gyuris et al., (1993) Cell 75:791-803

[1178] Hames and Higgins (1985) Nucleic Acid Hybridization: A Practical Approach. Harnes and Higgins Ed., IRL Press, Oxford.

[1179] Hammerling (1981), Monoclonal Antibodies and T-Cell Hybridomas, Elsevier, N.Y. 563-681.

[1180] Hansson et al., (1999), J. Mol. Biol. 287:265-276.

[1181] Haravama (1998), Trends Biotechnol. 16(2): 76-82.

[1182] Harland et al., (1985) J. Cell. Biol. 101:1094-1095.

[1183] Harlow and Lane, (1988) Antibodies A Laboratory Manual. Cold Spring Harbor Laboratory. pp. 53-242

[1184] Harper et al., (1993), Cell, 75 : 805-816

[1185] Harrop et al., (1998), J. Immunol. 161(4):1786-1794.

[1186] Haynes et al., (1996) J Biotechnol. 44(1-3):37-42.

[1187] Henikoff and Henikoff, (1993), Proteins 17:49-61

[1188] Henikoff et al., (2000) Electrophoresis 21(9):1700-6

[1189] Henikoff et al., (2000) Nucleic Acids Res. 28(1):228-30

[1190] Higgins et al., (1996), Meth. Enzymol. 266:383-402

[1191] Hillier and Green (1991) PCR Methods Appl., 1: 124-8.

[1192] Hoess et al., (1986) Nucleic Acids Res. 14:2287-2300.

[1193] Hofmann et al., (1999) Nucl. Acids Res. 27:215-219.;

[1194] Holm and Sander (1996) Nucleic Acids Res. 24(1):206-9

[1195] Holm and Sander (1997) Nucleic Acids Res. 25(1):231-4

[1196] Holm and Sander (1999) Nucleic Acids Res. 27(1):244-7

[1197] Hoppe et al., (1994), FEBS Letters. 344:191.

[1198] Houghten (1985), Proc. Natl. Acad. Sci. USA 82:5131-5135.

[1199] Huang et al., (1996) Cancer Res 56(5): 1137-1141.

[1200] Hunkapiller et al., (1984) Nature. 310(5973): 105-11.

[1201] Huston et al., (1991), Meth. Enymol. 203:46_{—}88.

[1202] Huygen et al., (1996) Nature Medicine. 2(8):893-898.

[1203] Izant and Weintraub, (1984) Cell 36(4):1007-15

[1204] Jameson and Wolf, (1988), Comp. Appl. Biosci. 4:181-186

[1205] Julan et al., (1992) J. Gen. Virol. 73:3251-3255.

[1206] Kanegae et al., (1995) Nucl. Acids Res. 23:3816-3821.

[1207] Karlin and Altschul, (1990), Proc. Natl. Acad. Sci. USA 87:2267-2268

[1208] Kettleborough et al., (1994), Eur. L Immunol. 24:952-958.

[1209] Kim U-J. et al., (1996) Genomics 34:213-218.

[1210] Klein et al., (1987) Nature. 327:70-73.

[1211] Kohler and Milstein, (1975) Nature 256:495

[1212] Koller et al.; (1992) Annu. Rev. Immunol. 10:705-730.

[1213] Kostelny et al., (1992), J. Immunol. 148:1547-1553.

[1214] Landschulz et al., (1988), Science. 240:1759.

[1215] Ledbetter et al., (1990) Genomics 6:475-481

[1216] Lenhard et al., (1996) Gene. 169:187-190.

[1217] Levy et al., (1996) Gene Ther. 3(3):201-11.

[1218] Lewin, (1989), Proc. Natl. Acad. Sci. USA86:9832-8935.

[1219] Liautard et al., (1997), Cytokine. 9(4):233-241.

[1220] Linton et al., (1993) J. Clin. Invest. 92:3029-3037.

[1221] Liu et al., (1994) Proc. Natl. Acad. Sci. USA. 91: 4528-4262.

[1222] Lo Conte et al., (2000) Nucleic Acids Res. 28(1):257-9.

[1223] Lockhart et al., (1996) Nature Biotechnology 14: 1675-1680

[1224] Lorenzo and Blasco (1998) Biotechniques. 24(2):308-313.

[1225] Lucas (1994), In: Development and Clinical Uses of Haempophilus b Conjugate;

[1226] Makrides, (1999) Protein Expr. Purif. 17(2) :183-202

[1227] Malik et al., (1992), Exp. Hematol. 20:1028-1035.

[1228] Mansour et al., (1988) Nature. 336:348-352.

[1229] Marshall et al., (1994) PCR Methods and Applications. 4:80-84.

[1230] Maurer et al., (1999) Mol Membr Biol. 16(1):12940.

[1231] McCormick et al., (1994)Genet. Anal. Tech. Appl. 11:158-164.

[1232] McLaughlin et al., (1996) Am. J. Hum. Genet. 59:561-569.

[1233] Miller and Whelan, (1997) Hum Gene Ther. 8(7):803-15.

[1234] Muller et al., (1998), Structure. 6(9): 1153-1167.

[1235] Mullinax et al., (1992), BioTechniques. 12(6):864-869.

[1236] Murvai et al., (2000) Nucleic Acids Res. 28(1):260-2

[1237] Murzin et al., (1995) J Mol Biol. 247(4):536-40

[1238] Muzyczka et al., (1992) Curr. Topics in Micro. and Immunol. 158:97-129.

[1239] Nada et al., (1993) Cell 73:1125-1135.

[1240] Nagaraja et al, (1997. Genome Research 7:210-222

[1241] Nagy et al., (1993), Proc. Natl. Acad. Sci. USA 90: 8424-8428.

[1242] Nakai and Horton, (1999) Trends Biochem. Sci., 24:34-36

[1243] Nakai and Kanehisa (1992) Genomics 14, 897-911

[1244] Naramura et al., (1994), Immunol. Lett. 39:91-99.

[1245] Narang et al., (1979), Methods Enzymol 68:90-98

[1246] Neda et al., (1991) J. Biol. Chem. 266:14143-14146.

[1247] Nevill-Manning et al., (1998) Proc. Natl. Acad. Sci. USA. 95, 5865-5871

[1248] Nicolau et al., (1982) Biochim. Biophys. Acta. 721:185-190.

[1249] Nicolau et al., (1987), Meth. Enzymol., 149:157-76.

[1250] Nissinoff, (1991), J. Immunol. 147(8): 2429-2438.

[1251] O'Reilly et al., (1992) Baculovirus Expression Vectors: A Laboratory Manual. W. H. Freeman and Co., New York.

[1252] Obermayr et al., (1996) Eur. J. Hum. Genet. 4:242-245

[1253] Ohno et al., (1994) Science. 265:781-784.

[1254] Oi et al., (1986), BioTechniques 4:214.

[1255] Oldenburg et al., (1992), Proc. Natl. Acad. Sci. USA 89:5393-5397.

[1256] Orengo et al., (1997) Structure. 5(8):1093-108

[1257] Ouchterlony et al., (1973) Chap. 19 in: Handbook of Experimental Immunology D. Wier (ed) Blackwell

[1258] Padlan, (1991), Molec. Immunol. 28(4/5):489-498.

[1259] Parmley and, Smith, (1988) Gene 73:305-318

[1260] Patten, et al. (1997), Curr Opinion Biotechnol. 8:724-733.

[1261] Pearl et al., (2000) Biochem Soc Trans. 28(2):269-75

[1262] Pearson and Lipman, (1988), Proc. Natl. Acad. Sci. USA 85(8):2444-2448

[1263] Pease and William, (1990), Exp. Cell. Res. 190: 209-211.

[1264] Persic et al., (1997), Gene. 1879-81

[1265] Pesole et al., (2000) Nucleic Acids Res, 28(1): 193-196

[1266] Peterson et al., (1993), Proc. Natl. Acad. Sci. USA, 90: 7593-7597.

[1267] Pietu et al., (1996) Genome Research 6:492-503

[1268] Pinckard et al., (1967), Clin. Exp. Immunol 2:331-340.

[1269] Pitard et al., (1997), J. Immunol. Methods. 205(2):177-190.

[1270] Pongor et al. (1993) Protein Eng. 6(4):391-5

[1271] Potter et al., (1984) Proc. Natl. Acad. Sci. U.S.A. 81(22):7161-7165.

[1272] Prat et al., (1998), J. Cell. Sci. 111(Pt2):237-247.

[1273] Raeymaekers et al., (1995) Genomics 29:170-178

[1274] Ramunsen et al., (1997), Electrophoresis, 18: 588-598.

[1275] Rattan et al., (1992) Ann NY Acad Sci 663:48-62

[1276] Reid et al., (1990) Proc. Natl. Acad. Sci. U.S.A. 87:4299-4303.

[1277] Robbins et al., (1987), Diabetes. 36:838-845.

[1278] Robertson, (1987), Embryo-derived stem cell lines. In: E. J. Robertson Ed. Teratocarcinomas and embrionic stem cells: a practical approach. IRL Press, Oxford, pp. 71.

[1279] Roguska et al., (1994), Proc. Natl. Acad. Sci. U.S.A. 91:969-973.

[1280] Ron et al., (1993), Biol Chem., 268 2984-2988.

[1281] Rose et al., (1980) Chap. 12 in: Methods in Immunodiagnosis, 2d Ed. John Wiley 503 Sons, New York

[1282] Rossi et al., (1991) Pharmacol. Ther. 50:245-254,

[1283] Roth et al., (1996) Nature Medicine. 2(9):985-991.

[1284] Roux et al., (1989) Proc. Natl. Acad. Sci. U.S.A. 86:9079-9083.

[1285] Sambrook et al., (1989) Molecular Cloning: A Laboratory Manual. 2ed. Cold Spring Harbor Laboratory, Cold Spring Harbor, N.Y.

[1286] Samson et al., (1996) Nature, 382(6593):722-725.

[1287] Samulski et al., (1989) J. Virol. 63:3822-3828.

[1288] Sanchez-Pescador (1988) J. Clin. Microbiol. 26(10):1934-1938.

[1289] Sander and Schneider (1991) Proteins. 9(1):56-68.)

[1290] Sauer et al., (1988) Proc. Natl. Acad. Sci. U.S.A. 85:5166-5170.

[1291] Sawai et al., (1995), AJRI 34:26-34.

[1292] Schedl et al., (1993b), Nucleic Acids Res., 21: 4783-4787.

[1293] Schedl et al., (993a), Nature, 362: 258-261.

[1294] Schena et al. (1995) Science 270:467-470

[1295] Schena et al., (1996), Proc Natl Acad Sci USA,.93(20):10614-10619.

[1296] Schuler et al., (1996) Science 274:540-546

[1297] Schultz et al., (1998) Proc Natl Acad Sci USA 95, 5857-5864

[1298] Schwartz and Dayhoff, (1978), eds., Matrices for Detecting Distance Relationships: Atlas of Protein Sequence and Structure, Washington: National Biomedical Research Foundation

[1299] Sczakiel et al., (1995) Trends Microbiol. 3(6):213-217.

[1300] Seifter et al., (1990) Meth Enzymol 182:626-646

[1301] Shay et al., (1991), Biochem. Biophys. Acta, 1072: 1-7.

[1302] Shizuya et al., (1992) Proc. Natl. Acad. Sci. U.S.A. 89:8794-8797.

[1303] Shu et al., (1993), Proc. Natl. Acad. Sci. U.S.A. 90:7995-7999.

[1304] Skerra et al., (1988), Science 240:1038-1040.

[1305] Smith and Johnson (1988) Gene. 67(1):31-40.

[1306] Smith et al., (1983) Mol. Cell. Biol. 3:2156-2165.

[1307] Smith et al., (1996) Antiviral Res. 32(2):99-115.

[1308] Sonnhammer and Kahn D (1994) Protein Sci. 3(3):482-92

[1309] Sonnhammer et al., (1997) Proteins. 28(3):405-20

[1310] Sosnowski, et al., (1997) Proc Natl Acad Sci USA 94:1119-1123

[1311] Sowdhamini et al., (1997) Protein Engineering 10:207, 215

[1312] Sternberg (1994) Mamm. Genome. 5:397-404.

[1313] Sternberg (1992) Trends Genet. 8:1-16.

[1314] Sternberg et al, (1999) Curr Opin Struct Biol. 9(3):368-73.

[1315] Stone et al., (2000) J Endocrinol. 164(2): 103-18.

[1316] Stryer, (1995) Biochemistry, 4th edition

[1317] Studnicka et al, (1994), Protein Engineering. 7(6):805-814.

[1318] Sutcliffe et al, (1983), Science. 219:660-666.

[1319] Szabo et al., (1995) Curr Opin Struct Biol 5, 699-705

[1320] Tascon et al., (1996) Nature Medicine. 2(8):888-892.

[1321] Taryman et al., (1995), Neuron. 14(4):755-762.

[1322] Tatusov et al, (1997) Science, 278, 631 :637

[1323] Tatusov et al., (2000) Nucleic Acids Res. 28(1):33-6.)

[1324] Te Riele et al., (1990) Nature. 348:649-651.

[1325] Thomas et al., (1986) Cell. 44:419-428.

[1326] Thomas et al., (1987) Cell. 51:503-512.

[1327] Thompson et al, (1994), Nucleic Acids Res. 22(2):4673-4680

[1328] Traunecker et al., (1988), Nature. 331:84-86.

[1329] Tur-Kaspa et al., (1986) Mol. Cell. Biol. 6:716-718.

[1330] Tutt et al., (1991), J. Immunol. 147:60-69.

[1331] Urdea (1988) Nucleic Acids Research. 11:4937-4957.

[1332] Urdea et al., (1991) Nucleic Acids Symp. Ser. 24:197-200.

[1333] Vaitukaitis et al., (1971) J. Clin. Endocrinol. Metab. 33:988-991

[1334] Valadon et al, (1996), J. Mol. Biol., 261:11-22.

[1335] Van der Lugt et al., (1991) Gene. 105:263-267.

[1336] Vil et al., (1992) Proc Natl Acad Sci US 89:11337-11341.

[1337] Viasak et al., (1983) Eur. J. Biochem. 135:123-126.

[1338] Wabiko et al., (1986) DNA. 5(4):305-314.

[1339] Wagner et al., (1996) Nat Biotechnol. 14(7):840-4.

[1340] Walker et al., (1996) Clin. Chem. 42:9-13.

[1341] Wang et al., (1997), Chromatographia, 44:205-208.

[1342] Warrington et al., (1991) Genomics 11:701-708

[1343] Westerink, (1995), Proc. Natl. Acad. Sci USA., 92:4021-4025

[1344] White (1997) B. A. Ed. in Methods in Molecular Biology 67: Humana Press, Totowa

[1345] White et al. (1997) Genomics. 12:301-306.

[1346] Wilson et al., (1984) Cell. 37(3):767-78.

[1347] Wong et al., (1980) Gene. 10:87-94.

[1348] Wood et al., (1985) Proc. Natl. Acad. Sci. USA 82(6):1585-1588

[1349] Wood et al., (1993), Proc. Natl. Acad. Sci. USA,90:4582-4585.

[1350] Wu and Ataai, (2000) Curr Opin Biotechnol. 11(2):205-8.

[1351] Wu and Wu,(1987) J. Biol. Chem. 262:4429-4432.

[1352] Wu and Wu, (1988) Biochemistry. 27:887-892.

[1353] Yagi T. et al., (1990) Proc. Natl. Acad. Sci. U.S.A. 87:9918-9922.

[1354] Yona et al., (1999) Proteins. 37(3):360-78

[1355] Yoon et al, (1998), J. Immunol. 160(7):3170-3179.

[1356] Zheng, X. X. et al. (1995), J. Immunol. 154:5590-5600.

[1357] Zhu et al., (1998), Cancer Res. 58(15):3209-3214.

[1358] Zou et al., (1994)Curr. Biol. 4:1099-1103.

[1359] Throughout this application, various publications, patents and published patent applications are cited. The disclosures of these publications, patents and published patent specification referenced in this application are hereby incorporated by reference into the present disclosure to more fully describe the state of the art to which this invention pertains.

TABLE I

| SEQ ID NO | SEQ ID NO | SEQ ID NO | SEQ ID NO | |
|---|---|---|---|---|
| from priority | in present | in present | in present | |
| application | application | application | application | |
| (nucl) | (nucl.) | (prt) | (nucl.) | Clone ID |
| 37 | | | NUC561 | 486589; 523280 |
| 51 | | | NUC562 | 500707076; 609080; 642931 |
| 179 | | | NUC563 | 147941; 153834; 193100 |
| 180 | | | NUC564 | 147941 |
| 183 | | | NUC565 | 100038; 100419; 100523; 100546 |
| 201 | | | NUC566 | 528046 |
| 326 | | | NUC567 | 484503 |
| 362 | | | NUC568 | 211034; 211122 |
| 440 | | | NUC569 | 627628 |
| 452 | | | NUC570 | 500713596; 500733538; 500741977 |
| 483 | | | NUC571 | 500730326 |
| 500 | | | NUC572 | 482482 |
| 505 | | | NUC573 | 611492 |
| 528 | | | NUC574 | 221311 |
| 573 | | | NUC575 | 144150 |
| 574 | | | NUC576 | 626500 |
| 587 | | | NUC577 | 490129 |
| 588 | | | NUC578 | 129471 |
| 593 | NUC86 | PRT255 | NUC406 | 500762786 |
| 599 | | | NUC579 | 148991; 206343; 211039 |
| 603 | | | NUC580 | 212418 |
| 621 | | | NUC581 | 395370 |
| 628 | | | NUC582 | 116680 |
| 653 | | | NUC583 | 224425 |
| 670 | | | NUC584 | 225626 |
| 678 | NUC87 | PRT256 | NUC407 | 822794 |
| 678 | NUC88 | PRT257 | NUC407 | 337572 |
| 693 | | | NUC585 | 500760143 |
| 703 | | | NUC586 | 125325; 145574; 158295; 225872; |
| | | | | 334779 |
| 746 | | | NUC587 | 620699 |
| 770 | | | NUC588 | 500735221 |
| 775 | | | NUC589 | 131662; 131668; 177901; 200591 |
| 796 | | | NUC590 | 500756189 |
| 812 | | | NUC591 | 500694179 |
| 940 | | | NUC592 | 158339; 213121; 220652; 236981; |
| | | | | 239275; 239598; 244360; 582565 |
| 988 | | | NUC593 | 238123; 239495; 334569; 582920 |
| 996 | | | NUC594 | 334818 |
| 1036 | | | NUC595 | 483794; 519407; 633595; 633902 |
| 1064 | | | NUC596 | 608607 |
| 1151 | | | NUC597 | 500743552; 500744660 |
| 1190 | | | NUC598 | 101006; 509431 |
| 1458 | | | NUC599 | 313060; 313135; 313174 |
| 1590 | | | NUC600 | 178255 |
| 1853 | | | NUC601 | 114927 |
| 1904 | | | NUC602 | 107824 |
| 2028 | | | NUC603 | 170306 |
| 2173 | NUC89 | PRT258 | NUC408 | 642374 |
| 2368 | | | NUC604 | 210539; 331006 |
| 2553 | | | NUC605 | 106061 |
| 2556 | | | NUC606 | 106061 |
| 2658 | | | NUC607 | 654607 |
| 2690 | | | NUC608 | 172048; 172057 |
| 2755 | | | NUC609 | 101090 |
| 2800 | | | NUC610 | 119222; 119491; 151036 |
| 2843 | | | NUC611 | 619446; 619452; 633712 |
| 2852 | | | NUC612 | 145573 |
| 2932 | | | NUC613 | 650981 |
| 2955 | | | NUC614 | 130068 |
| 3078 | | | NUC615 | 100966; 99482 |
| 3280 | | | NUC616 | 147041 |
| 3326 | | | NUC617 | 132294; 132317 |
| 3387 | | | NUC618 | 126303; 134231; 135124 |
| 3439 | | | NUC619 | 502644 |
| 3501 | | | NUC620 | 625238; 632902; 635258 |
| 3633 | | | NUC621 | 120631 |
| 3678 | | | NUC622 | 200451 |
| 3714 | NUC90 | PRT259 | NUC409 | 231569 |
| 3714 | NUC91 | PRT260 | NUC409 | 145151 |
| 3714 | | | NUC409 | 153628 |
| 3796 | | | NUC623 | 131690; 588080 |
| 3801 | | | NUC624 | 199999 |
| 3804 | | | NUC625 | 483173; 510100; 650405 |
| 3892 | | | NUC626 | 626911; 627852; 631702; 633566 |
| 3985 | | | NUC627 | 229507; 229539; 236257 |
| 4005 | | | NUC628 | 237312; 335729; 490055 |
| 4063 | | | NUC629 | 521127 |
| 4088 | NUC92 | PRT261 | NUC410 | 128061 |
| 4088 | NUC93 | PRT262 | NUC410 | 118027 |
| 4088 | | | NUC410 | 166676 |
| 4111 | NUC94 | PRT263 | NUC411 | 627202 |
| 4111 | | | NUC411 | 538182; 620818; 625154; 628241; |
| | | | | 629431; 633031; 634788 |
| 4126 | | | NUC630 | 153486 |
| 4172 | | | NUC631 | 241664 |
| 4261 | NUC95 | PRT264 | NUC412 | 112311 |
| 4340 | | | NUC632 | 500703884; 633346; 634598 |
| 4436 | | | NUC633 | 204316 |
| 4609 | NUC1 | PRT170 | NUC339 | 502084 |
| 4647 | NUC2 | PRT171 | NUC340 | 589115 |
| 4660 | | | NUC634 | 643537 |
| 4664 | NUC3 | PRT172 | NUC341 | 1000902917 |
| 4678 | NUC4 | PRT173 | NUC342 | 602517 |
| 4678 | NUC5 | PRT174 | NUC342 | 478210 |
| 4678 | | | NUC342 | 763189 |
| 4682 | NUC6 | PRT175 | NUC343 | 500698315 |
| 4687 | NUC7 | PRT176 | NUC344 | 114180 |
| 4687 | | | NUC344 | 114106; 175654; 654896 |
| 4690 | | | NUC635 | 114106; 211516; 654896 |
| 4694 | NUC8 | PRT177 | NUC345 | 338112 |
| 4696 | NUC9 | PRT178 | NUC346 | 338100 |
| 4733 | NUC10 | PRT179 | NUC347 | 784093 |
| 4807 | NUC11 | PRT180 | NUC348 | 1000943975 |
| 4809 | NUC12 | PRT181 | NUC349 | 1000771934 |
| 4830 | NUC13 | PRT182 | NUC350 | 186661 |
| 4855 | NUC14 | PRT183 | NUC351 | 105855 |
| 4900 | NUC15 | PRT184 | NUC352 | 500742698 |
| 4908 | | | NUC636 | 538424 |
| 4943 | | | NUC637 | 144901; 170048; 206458; 240439; |
| | | | | 241215 |
| 4947 | NUC16 | PRT185 | NUC353 | 201980 |
| 4947 | NUC17 | PRT186 | NUC353 | 198002 |
| 4976 | | | NUC638 | 248323; 248866 |
| 5000 | NUC18 | PRT187 | NUC354 | 500739047 |
| 5002 | NUC19 | PRT188 | NUC355 | 1000904024 |
| 5005 | | | NUC639 | 155986; 222313; 237229 |
| 5011 | NUC20 | PRT189 | NUC356 | 125817 |
| 5040 | | | NUC640 | 646668 |
| 5058 | | | NUC641 | 224715 |
| 5071 | NUC21 | PRT190 | NUC357 | 147648 |
| 5089 | NUC22 | PRT191 | NUC358 | 1000839315 |
| 5117 | NUC23 | PRT192 | NUC359 | 122473 |
| 5141 | NUC24 | PRT193 | NUC360 | 585770 |
| 5141 | NUC25 | PRT194 | NUC360 | 123996 |
| 5162 | NUC26 | PRT195 | NUC361 | 1000904064 |
| 5167 | NUC27 | PRT196 | NUC362 | 482181 |
| 5178 | NUC28 | PRT197 | NUC363 | 500731597 |
| 5192 | NUC29 | PRT198 | NUC364 | 581232 |
| 5214 | | | NUC642 | 394359 |
| 5230 | NUC30 | PRT199 | NUC365 | 613647 |
| 5240 | NUC31 | PRT200 | NUC366 | 715437 |
| 5250 | NUC32 | PRT201 | NUC367 | 1000878517 |
| 5262 | NUC33 | PRT202 | NUC368 | 544474 |
| 5270 | NUC34 | PRT203 | NUC369 | 143880 |
| 5278 | NUC35 | PRT204 | NUC370 | 1000853793 |
| 5358 | NUC36 | PRT205 | NUC371 | 500732568 |
| 5453 | NUC37 | PRT206 | NUC372 | 427150 |
| 5453 | NUC38 | PRT207 | NUC372 | 593306 |
| 5453 | NUC39 | PRT208 | NUC372 | 593993 |
| 5453 | NUC40 | PRT209 | NUC372 | 590939 |
| 5453 | | | NUC372 | 432874; 435627 |
| 5494 | NUC41 | PRT210 | NUC373 | 155600 |
| 5494 | NUC42 | PRT211 | NUC373 | 641537 |
| 5499 | | | NUC643 | 500702809 |
| 5533 | NUC43 | PRT212 | NUC374 | 1000872335 |
| 5563 | NUC44 | PRT213 | NUC375 | 1000852500 |
| 5609 | NUC45 | PRT214 | NUC376 | 500720555 |
| 5657 | NUC46 | PRT215 | NUC377 | 500715373 |
| 5691 | NUC47 | PRT216 | NUC378 | 167435 |
| 5748 | NUC48 | PRT217 | NUC379 | 620429 |
| 5748 | NUC49 | PRT218 | NUC379 | 613335 |
| 5806 | NUC50 | PRT219 | NUC380 | 589848 |
| 5806 | NUC51 | PRT220 | NUC380 | 211883 |
| 5806 | NUC52 | PRT221 | NUC380 | 642603 |
| 5806 | NUC53 | PRT222 | NUC380 | 193316 |
| 5816 | NUC54 | PRT223 | NUC381 | 495917 |
| 5824 | NUC55 | PRT224 | NUC382 | 160935 |
| 5861 | NUC56 | PRT225 | NUC383 | 593736 |
| 5885 | NUC57 | PRT226 | NUC384 | 613887 |
| 5913 | NUC58 | PRT227 | NUC385 | 166601 |
| 5947 | NUC96 | PRT265 | NUC413 | 654627 |
| 5966 | NUC59 | PRT228 | NUC386 | 500762665 |
| 5966 | NUC60 | PRT229 | NUC386 | 500742089 |
| 5966 | NUC61 | PRT230 | NUC386 | 500759088 |
| 5970 | | | NUC644 | 193675; 423656 |
| 5974 | NUC62 | PRT231 | NUC387 | 650666 |
| 5983 | | | NUC645 | 626803 |
| 5985 | NUC63 | PRT232 | NUC388 | 594066 |
| 6011 | NUC97 | PRT266 | NUC414 | 1000886279 |
| 6080 | NUC64 | PRT233 | NUC389 | 642569 |
| 6081 | NUC65 | PRT234 | NUC390 | 519656 |
| 6108 | | | NUC646 | 145580 |
| 6159 | NUC66 | PRT235 | NUC391 | 1000903258 |
| 6231 | NUC67 | PRT236 | NUC392 | 715579 |
| 6238 | | | NUC647 | 500694849; 500699591; 500706028; |
| | | | | 500710562; 500724984; 625642; |
| | | | | 628058; 633030 |
| 6252 | NUC98 | PRT267 | NUC415 | 1000855876 |
| 6283 | NUC68 | PRT237 | NUC393 | 820495 |
| 6290 | NUC69 | PRT238 | NUC394 | 500709853 |
| 6290 | NUC70 | PRT239 | NUC394 | 500757399 |
| 6290 | NUC71 | PRT240 | NUC394 | 592868 |
| 6322 | NUC72 | PRT241 | NUC395 | 500739746 |
| 6329 | | | NUC648 | 615173 |
| 6334 | | | NUC649 | 237324 |
| 6345 | NUC73 | PRT242 | NUC396 | 500714172 |
| 6345 | NUC74 | PRT243 | NUC396 | 500716683 |
| 6350 | NUC75 | PRT244 | NUC397 | 1000869553 |
| 6358 | NUC76 | PRT245 | NUC398 | 608537 |
| 6384 | NUC77 | PRT246 | NUC399 | 1000906334 |
| 6400 | | | NUC650 | 149691 |
| 6418 | | | NUC651 | 237026 |
| 6431 | NUC78 | PRT247 | NUC400 | 614334 |
| 6453 | NUC99 | PRT268 | NUC416 | 211056 |
| 6636 | | | NUC652 | 608607 |
| 6660 | | | NUC653 | 129407 |
| 6688 | NUC100 | PRT269 | NUC417 | 646099 |
| 6727 | NUC79 | PRT248 | NUC401 | 199782 |
| 6727 | NUC80 | PRT249 | NUC401 | 821212 |
| 6727 | NUC81 | PRT250 | NUC401 | 202863 |
| 6835 | NUC101 | PRT270 | NUC418 | 158243 |
| 6865 | | | NUC654 | 612052 |
| 6892 | NUC102 | PRT271 | NUC419 | 153261 |
| 6892 | NUC103 | PRT272 | NUC419 | 650872 |
| 6892 | NUC104 | PRT273 | NUC419 | 599054 |
| 6892 | NUC105 | PRT274 | NUC419 | 152042 |
| 6892 | NUC106 | PRT275 | NUC419 | 493328 |
| 7000 | NUC107 | PRT276 | NUC420 | 538694 |
| 7041 | | | NUC655 | 142587; 145561; 146609; |
| | | | | 149065; 153394; 153773; |
| | | | | 205319; 206906; 215376; |
| | | | | 227424; 228016; 240538; |
| | | | | 242510; 530873; 588304 |
| 7533 | | | NUC656 | 500758154 |
| 7535 | | | NUC657 | 632835 |
| 7577 | | | NUC658 | 205411 |
| 7697 | NUC108 | PRT277 | NUC421 | 653966 |
| 7712 | NUC109 | PRT278 | NUC422 | 237552 |
| 7712 | | | NUC422 | 202997; 206456 |
| 8009 | NUC110 | PRT279 | NUC423 | 645452 |
| 8078 | NUC111 | PRT280 | NUC424 | 335367 |
| 8078 | NUC112 | PRT281 | NUC424 | 334488 |
| 8078 | NUC113 | PRT282 | NUC424 | 329736 |
| 8078 | NUC114 | PRT283 | NUC424 | 244355 |
| 8078 | NUC115 | PRT284 | NUC424 | 150197 |
| 8078 | NUC116 | PRT285 | NUC424 | 244242 |
| 8078 | NUC117 | PRT286 | NUC424 | 223147 |
| 8078 | NUC118 | PRT287 | NUC424 | 221735 |
| 8078 | NUC119 | PRT288 | NUC424 | 215414 |
| 8078 | NUC120 | PRT289 | NUC424 | 149875 |
| 8078 | NUC121 | PRT290 | NUC424 | 167198 |
| 8078 | NUC122 | PRT291 | NUC424 | 193511 |
| 8078 | NUC123 | PRT292 | NUC424 | 226917 |
| 8078 | NUC124 | PRT293 | NUC424 | 225461 |
| 8078 | NUC125 | PRT294 | NUC424 | 193742 |
| 8078 | | | NUC424 | 165071; 165245; 200864; 221825; |
| | | | | 243230; 581542 |
| 8079 | | | NUC659 | 628867 |
| 8097 | | | NUC660 | 486772; 511180 |
| 8166 | NUC126 | PRT295 | NUC425 | 642948 |
| 8166 | NUC127 | PRT296 | NUC425 | 638743 |
| 8262 | | | NUC661 | 151662 |
| 8341 | | | NUC662 | 101420 |
| 8534 | | | NUC663 | 131658; 196152; 243686 |
| 8666 | NUC128 | PRT297 | NUC426 | 763024 |
| 8666 | NUC129 | PRT298 | NUC426 | 500720430 |
| 8671 | | | NUC664 | 193411 |
| 8744 | | | NUC665 | 162906 |
| 8968 | NUC82 | PRT251 | NUC402 | 771827 |
| 8968 | NUC130 | PRT299 | NUC402 | 500695719 |
| 8968 | | | NUC402 | 620376; 635045 |
| 8994 | | | NUC666 | 199362; 227277; 242546 |
| 9297 | | | NUC667 | 651871 |
| 9327 | | | NUC668 | 247810 |
| 9332 | | | NUC669 | 199155; 200810; 336623 |
| 9406 | | | NUC670 | 106061 |
| 9407 | | | NUC671 | 106061 |
| 9668 | | | NUC672 | 168218; 197771; 205623; 228775; |
| | | | | 238794 |
| 9679 | NUC131 | PRT300 | NUC427 | 206381 |
| 9755 | | | NUC673 | 197091 |
| 9868 | | | NUC674 | 144783; 206407; 215714; 234057; |
| | | | | 336758; 582582 |
| 10044 | | | NUC675 | 107768; 111854; 500721812; 500723626; |
| | | | | 500723636; 500724389; |
| | | | | 500725580; 500729834; 500735442; |
| | | | | 500735787; 500758255; 500762395; |
| | | | | 586703; 589397; 612312; 635730; |
| | | | | 642849; 645812; 762987; 767609 |
| 10322 | NUC132 | PRT301 | NUC428 | 200895 |
| 10526 | NUC133 | PRT302 | NUC429 | 1000891255 |
| 10584 | | | NUC676 | 500745219 |
| 10650 | | | NUC677 | 187889; 242499 |
| 10739 | NUC134 | PRT303 | NUC430 | 637548 |
| 10743 | NUC135 | PRT304 | NUC431 | 767426 |
| 10744 | NUC136 | PRT305 | NUC432 | 500691428 |
| 10761 | | | NUC678 | 131060 |
| 10880 | NUC137 | PRT306 | NUC433 | 116153 |
| 10942 | NUC138 | PRT307 | NUC434 | 500699885 |
| 10942 | NUC139 | PRT308 | NUC434 | 746303 |
| 10942 | NUC140 | PRT309 | NUC434 | 500705937 |
| 10942 | | | NUC434 | 500705002; 500712632; 633931; |
| | | | | 634489; 813634; 816859 |
| 11019 | NUC141 | PRT310 | NUC435 | 150568 |
| 11278 | NUC142 | PRT311 | NUC436 | 495638 |
| 11342 | NUC143 | PRT312 | NUC437 | 143196 |
| 11562 | | | NUC679 | 187543 |
| 11688 | | | NUC680 | 165419; 165544; 166387; 181924; |
| | | | | 181930; 196904; 199001; 199269; |
| | | | | 224447; 238731; 243770 |
| 11735 | NUC144 | PRT313 | NUC438 | 633418 |
| 11735 | NUC145 | PRT314 | NUC438 | 422878 |
| 11735 | | | NUC438 | 500706283; 500711792; 500712711; |
| | | | | 500725618; 500738973; 651370 |
| 11813 | | | NUC681 | 633791 |
| 12039 | NUC146 | PRT315 | NUC439 | 546312 |
| 12043 | | | NUC682 | 632330 |
| 12048 | | | NUC683 | 101164 |
| 12098 | | | NUC684 | 135037 |
| 12202 | | | NUC685 | 168232; 243338 |
| 12220 | | | NUC686 | 433866 |
| 12243 | | | NUC687 | 659527 |
| 12263 | | | NUC688 | 139596 |
| 12276 | | | NUC689 | 624892; 628879; 631590; 633480 |
| 12490 | | | NUC690 | 500704734; 500744586; 500744972; |
| | | | | 611533; 634337 |
| 12604 | NUC147 | PRT316 | NUC440 | 614106 |
| 12604 | | | NUC440 | 178304 |
| 12657 | | | NUC691 | 238579; 248948; 397864; 521873; |
| | | | | 526295; 589951 |
| 12788 | NUC148 | PRT317 | NUC441 | 330777 |
| 12901 | NUC149 | PRT318 | NUC442 | 124608 |
| 12907 | NUC150 | PRT319 | NUC443 | 478617 |
| 12907 | NUC151 | PRT320 | NUC443 | 481184 |
| 13013 | | | NUC692 | 583731; 650307; 650848 |
| 13202 | | | NUC693 | 238886 |
| 13229 | NUC152 | PRT321 | NUC444 | 612301 |
| 13256 | NUC153 | PRT322 | NUC445 | 165123 |
| 13256 | NUC154 | PRT323 | NUC445 | 165643 |
| 13256 | | | NUC445 | 142964; 150214; 223536; 245008 |
| 13267 | NUC155 | PRT324 | NUC446 | 488818 |
| 13285 | | | NUC694 | 193487; 238191; 248387 |
| 26638 | | | NUC695 | 645819 |
| 26710 | | | NUC696 | 600909; 608784; 611758; 614721; |
| | | | | 619435; 620041; 620372; 625815; |
| | | | | 625933; 625983; 626308; 627299; |
| | | | | 627481; 628147; 628753; 631655; |
| | | | | 633039; 633371; 633760; 634553; |
| | | | | 642966 |
| 26726 | | | NUC697 | 421115 |
| 26786 | | | NUC698 | 500702480 |
| 26982 | | | NUC699 | 638872 |
| 27084 | NUC156 | PRT325 | NUC447 | 242080 |
| 27084 | | | NUC447 | 128161; 186671; 210505; 211578; |
| | | | | 214909; 221663; 222101; 223000; |
| | | | | 224361; 226849; 242326; 242424; |
| | | | | 243662; 244913; 247912 |
| 27273 | | | NUC700 | 525674; 601556 |
| 27301 | | | NUC701 | 135037 |
| 27336 | | | NUC702 | 500742735 |
| 27361 | | | NUC703 | 205346; 530902 |
| 27374 | | | NUC704 | 643006 |
| 27627 | | | NUC705 | 129706; 223196 |
| 27697 | | | NUC706 | 500701900 |
| 27877 | | | NUC707 | 99497 |
| 28413 | | | NUC708 | 135042 |
| 28517 | | | NUC709 | 150011; 201848 |
| 28518 | | | NUC710 | 500721700; 500729093; 500730152 |
| 29120 | NUC157 | PRT326 | NUC448 | 488444 |
| 29469 | | | NUC711 | 638852 |
| 29472 | | | NUC712 | 637812 |
| 29557 | | | NUC713 | 188208 |
| 29673 | | | NUC714 | 650606 |
| 29814 | | | NUC715 | 813496 |
| 30218 | | | NUC716 | 241681; 242553; 589203 |
| 30446 | | | NUC717 | 105288 |
| 30477 | | | NUC718 | 500724995; 500758517 |
| 30583 | | | NUC719 | 117932; 194613; 225013; 331614 |
| 30719 | | | NUC720 | 637363 |
| 31356 | | | NUC721 | 106998 |
| 31422 | NUC158 | PRT327 | NUC449 | 500732587 |
| 31554 | | | NUC722 | 222161 |
| 31627 | | | NUC723 | 173050 |
| 31726 | | | NUC724 | 393750 |
| 31744 | | | NUC725 | 176380 |
| 31790 | | | NUC726 | 625728 |
| 32102 | | | NUC727 | 500762549 |
| 32473 | NUC159 | PRT328 | NUC450 | 183902 |
| 32475 | NUC160 | PRT329 | NUC451 | 635993 |
| 32962 | | | NUC728 | 500740719 |
| 33130 | | | NUC729 | 165852; 165888 |
| 33712 | NUC161 | PRT330 | NUC452 | 398703 |
| 35005 | | | NUC730 | 124493 |
| 35185 | NUC83 | PRT252 | NUC403 | 589785 |
| 35258 | | | NUC731 | 224898 |
| 35326 | | | NUC732 | 145027 |
| 35597 | | | NUC733 | 237630 |
| 35912 | | | NUC734 | 637431 |
| 35984 | | | NUC735 | 117238 |
| 36122 | | | NUC736 | 226039 |
| 37337 | | | NUC737 | 143508; 196052; 221995 |
| 38112 | | | NUC738 | 129444 |
| 38220 | | | NUC739 | 608709 |
| 38311 | | | NUC740 | 600921 |
| 38631 | | | NUC741 | 194909 |
| 38749 | | | NUC742 | 163588 |
| 38890 | NUC162 | PRT331 | NUC453 | 500742815 |
| 38890 | NUC163 | PRT332 | NUC453 | 500735594 |
| 38890 | NUC164 | PRT333 | NUC453 | 500737569 |
| 38890 | NUC165 | PRT334 | NUC453 | 500730242 |
| 38890 | NUC166 | PRT335 | NUC453 | 500766374 |
| 38890 | NUC167 | PRT336 | NUC453 | 500711885 |
| 40163 | | | NUC743 | 244540 |
| 40975 | | | NUC744 | 106061 |
| 40991 | | | NUC745 | 106061 |
| 42896 | | | NUC746 | 137110 |
| 43190 | | | NUC747 | 244266 |
| 44053 | | | NUC748 | 236316; 249443; 392450; 449591; |
| | | | | 486460; 509697; 519210; 528872; |
| | | | | 585226; 589902; 601550 |
| 45091 | | | NUC749 | 238559 |
| 45179 | | | NUC750 | 132269 |
| 45274 | NUC84 | PRT253 | NUC404 | 1000867870 |
| 46679 | NUC85 | PRT254 | NUC405 | 140265 |
| 47171 | | | NUC751 | 420959 |
| 48024 | NUC168 | PRT337 | NUC454 | 113448 |
| 48548 | | | NUC752 | 227400 |
| 48603 | | | NUC753 | 200687; 244886 |
| 48670 | | | NUC754 | 164887 |
| 48671 | | | NUC755 | 221136 |
| 48823 | | | NUC756 | 525888 |
| 48901 | | | NUC757 | 525775 |
| 49018 | | | NUC758 | 229481 |
| 49034 | | | NUC759 | 237358 |
| 49133 | | | NUC760 | 224706; 582974 |
| 49140 | | | NUC761 | 636146 |
| 49261 | | | NUC762 | 186091 |
| 49387 | | | NUC763 | 212526 |
| 49416 | | | NUC764 | 530211 |
| 49426 | | | NUC765 | 313150; 313151 |
| 49493 | | | NUC766 | 213393 |
| 49640 | | | NUC767 | 626919 |
| 49863 | | | NUC768 | 181361; 382057; 631692 |
| 49871 | | | NUC769 | 181361; 382057; 631692 |
| 50015 | | | NUC770 | 203070; 331013 |
| 50049 | | | NUC771 | 196104 |
| 50112 | | | NUC772 | 118123; 335719 |
| 50185 | | | NUC773 | 489405; 496185 |
| 50241 | | | NUC774 | 145339; 156186; 244350 |
| 50353 | | | NUC775 | 119282 |
| 50763 | | | NUC776 | 500701668 |
| 50982 | | | NUC777 | 637372 |
| 51130 | | | NUC778 | 180402 |
| 51212 | | | NUC779 | 238923 |
| 51346 | | | NUC780 | 646118 |
| 51380 | NUC169 | PRT338 | NUC455 | 523002 |
| 51400 | | | NUC781 | 231102 |
| 51796 | | | NUC782 | 210281 |
| 51954 | | | NUC783 | 141971; 183117; 205855; 502241 |
| 52076 | | | NUC784 | 625028 |

[1360] TABLE II

| SEQ ID NO. | |
|---|---|
| in priority | |
| application | Chromosomal location |
| 51 | 3q26.2 |
| 452 | 2q31 |
| 483 | 11p11.2 |
| 505 | 20p12 |
| 573 | 5q21 |
| 796 | 15 |
| 1151 | 22q11.2 |
| 1590 | X |
| 2028 | X |
| 2932 | 8p23 |
| 3280 | 21 |
| 3326 | 15 |
| 3804 | 16p13.3 |
| 4172 | 1, 15q13-q14 |
| 4340 | 1 |
| 4609 | 4p13 |
| 4647 | 11q23, 11q23.3 |
| 4694 | 12p13.2 |
| 4733 | 14q32.1 |
| 4855 | 1q23-1q24 |
| 4908 | 12p13 |
| 5011 | 7q32, 7q32-36 |
| 5040 | 8p23 |
| 5089 | 4q11 |
| 5167 | 12 |
| 5278 | 19q13.2 |
| 5563 | 1, 2 |
| 5947 | 11q23 |
| 5974 | 4q28, 4q28-q31 |
| 6011 | 4 |
| 6290 | 2p13 |
| 6322 | 2p13 |
| 6345 | 16q24.3 |
| 6400 | 10q25-26 |
| 6892 | 4 |
| 7697 | 2p11, 4q28 |
| 8166 | 14q32 |
| 8666 | 16 |
| 8671 | 16 |
| 9755 | 3 |
| 10044 | 12q, 16 |
| 10322 | 1q11.1, 1q21 |
| 10584 | 3p21.3 |
| 10744 | 6 |
| 11019 | 11p11.2, 22q13 |
| 11342 | 7q21 |
| 12907 | 7q36.1 |
| 13202 | 15 |
| 13285 | 2q23-24, 11q23.2-24.2 |
| 27697 | 12p11.2 |
| 28517 | 2q31 |
| 28518 | 2q31 |
| 29673 | 16p13.3 |
| 29814 | 11 |
| 31422 | 11q13 |
| 31627 | 11 |
| 32962 | 9q32-33 |
| 33712 | 3p21.3, 3p21.31 |
| 35185 | 2 |
| 38631 | 15 |
| 48823 | 13q34-qter, 17 |
| 49018 | 7q22 |
| 49133 | 1q32 |
| 49387 | 17q21 |
| 50015 | 5q31 |
| 51380 | Xq28 |

[1361] TABLE III

| SEQ ID NO. in | Tissue Distribution |
|---|---|
| 37 | I: 11 |
| 51 | A: 55 B: 4 C: 1 E: 1 F: 30 G: 19 H: 9 |
| 179 | F: 16 K: 4 |
| 180 | F: 5 K: 1 |
| 183 | H: 6 |
| 201 | C: 1 |
| 326 | I: 3 |
| 362 | K: 2 |
| 440 | A: 7 |
| 452 | F: 1 G: 5 |
| 483 | G: 4 |
| 500 | I: 1 |
| 505 | A: 2 |
| 528 | K: 2 |
| 573 | F: 3 K: 1 |
| 574 | A: 1 |
| 587 | H: 1 I: 3 |
| 588 | F: 6 K: 2 |
| 593 | A: 2 C: 15 F: 2 G: 14 |
| 599 | A: 8 F: 7 K: 3 |
| 603 | K: 1 |
| 621 | C: 1 |
| 628 | F: 1 K: 3 |
| 653 | B: 6 F: 3 G: 1 I: 1 K: 7 |
| 670 | K: 11 |
| 678 | F: 1 K: 2 |
| 693 | B: 7 G: 7 |
| 703 | F: 9 K: 4 |
| 746 | A: 9 H: 1 K: 2 |
| 770 | G: 4 |
| 775 | F: 1 K: 13 |
| 796 | G: 1 |
| 812 | A: 13 F: 1 H: 1 |
| 940 | F: 8 |
| 988 | F: 8 K: 1 |
| 996 | K: 4 |
| 1036 | A: 13 I: 11 |
| 1064 | A: 12 B: 130 C: 16 D: 7 F: 1 G: 16 |
| 1151 | A: 9 |
| 1190 | B: 4 C: 1 H: 7 I: 6 |
| 1458 | J: 55 |
| 1590 | A: 1 |
| 1853 | A: 1 G: 1 H: 1 |
| 1904 | H: 1 |
| 2028 | A: 8 |
| 2173 | B: 1 C: 3 D: 1 G: 1 |
| 2368 | K: 4 |
| 2553 | B: 7 D: 5 H: 39 |
| 2556 | B: 7 D: 5 H: 39 |
| 2658 | D: 1 |
| 2690 | K: 2 |
| 2755 | H: 1 |
| 2800 | F: 8 K: 6 |
| 2843 | A: 8 G: 1 K: 3 |
| 2852 | F: 1 |
| 2932 | D: 1 |
| 2955 | K: 1 |
| 3078 | H: 2 |
| 3280 | F: 4 K: 3 |
| 3326 | H: 2 |
| 3387 | H: 7 |
| 3439 | I: 5 |
| 3501 | A: 10 C: 1 |
| 3633 | A: 6 H: 3 |
| 3678 | K: 2 |
| 3714 | F: 4 K: 1 |
| 3796 | F: 1 K: 1 |
| 3801 | K: 2 |
| 3804 | B: 1 C: 10 D: 1 G: 2 I: 11 |
| 3892 | A: 9 |
| 3985 | B: 1 C: 5 D: 1 H: 1 J: 6 |
| 4005 | F: 6 I: 2 K: 2 |
| 4063 | A: 2 B: 10 C: 4 |
| 4088 | K: 6 |
| 4111 | A: 11 |
| 4126 | F: 3 K: 1 |
| 4172 | F: 3 K: 2 |
| 4261 | H: 2 |
| 4340 | A: 3 G: 3 I: 1 |
| 4436 | F: 3 |
| 4609 | D: 10 |
| 4647 | D: 3 |
| 4660 | D: 1 |
| 4664 | B: 48 C: 2 H: 2 I: 3 |
| 4678 | C: 5 D: 17 G: 4 |
| 4682 | G: 1 |
| 4687 | D: 5 F: 2 H: 1 |
| 4690 | D: 3 F: 1 I: 1 K: 1 |
| 4694 | I: 3 |
| 4696 | I: 1 |
| 4733 | D: 1 |
| 4807 | B: 11 H: 1 |
| 4809 | I: 1 |
| 4830 | K: 1 |
| 4855 | H: 1 |
| 4900 | A: 1 |
| 4908 | A: 16 |
| 4943 | F: 6 K: 2 |
| 4947 | K: 3 |
| 4976 | J: 2 |
| 5000 | A: 2 B: 14 C: 17 D: 5 F: 1 G: 9 H: 3 I: 3 |
| 5002 | B: 2 |
| 5005 | C: 31 F: 1 J: 2 K: 2 |
| 5011 | H: 5 I: 2 |
| 5040 | B: 1 C: 2 D: 11 G: 1 J: 1 |
| 5058 | K: 1 |
| 5071 | F: 1 K: 1 |
| 5089 | I: 1 |
| 5117 | H: 7 |
| 5141 | F: 2 K: 1 |
| 5162 | A: 1 B: 8 |
| 5167 | I: 1 |
| 5178 | G: 1 |
| 5192 | F: 14 K: 3 |
| 5214 | A: 10 B: 19 C: 5 |
| 5230 | A: 3 B: 6 C: 9 D: 1 F: 1 G: 4 H: 3 I: 2 |
| 5240 | A: 1 |
| 5250 | A: 3 B: 39 C: 29 D: 3 H: 3 I: 1 K: 1 |
| 5262 | A: 3 B: 39 C: 34 D: 3 H: 3 I: 1 K: 1 |
| 5270 | B: 8 |
| 5278 | D: 1 |
| 5358 | G: 1 |
| 5453 | A: 2 C: 6 |
| 5494 | A: 1 D: 1 |
| 5499 | A: 3 |
| 5533 | A: 2 B: 7 C: 1 |
| 5563 | D: 1 F: 1 |
| 5609 | G: 3 |
| 5657 | G: 1 |
| 5691 | K: 1 |
| 5748 | A: 3 B: 1 C: 4 D: 1 G: 30 H: 1 |
| 5806 | A: 2 B: 7 C: 1 F: 1 I: 3 K: 3 |
| 5816 | B: 5 |
| 5824 | H: 3 |
| 5861 | B: 16 C: 27 D: 13 F: 7 H: 21 I: 12 K: 4 |
| 5885 | A: 1 |
| 5913 | K: 1 |
| 5947 | D: 2 |
| 5966 | G: 11 |
| 5970 | C: 4 |
| 5974 | D: 12 |
| 5983 | A: 5 |
| 5985 | B: 2 C: 5 H: 1 I: 1 K: 2 |
| 6011 | B: 1 |
| 6080 | B: 1 I: 1 |
| 6081 | I: 9 |
| 6108 | F: 5 |
| 6159 | B: 1 |
| 6231 | A: 1 |
| 6238 | A: 15 B: 5 G: 14 H: 3 I: 2 |
| 6252 | G: 7 |
| 6283 | F: 1 K: 1 |
| 6290 | B: 3 |
| 6322 | C: 1 |
| 6329 | A: 1 |
| 6334 | F: 51 K: 13 |
| 6345 | A: 9 G: 1 |
| 6350 | A: 1 B: 2 |
| 6358 | B: 9 H: 1 |
| 6384 | B: 1 C: 1 |
| 6400 | K: 1 |
| 6418 | K: 1 |
| 6431 | A: 1 B: 1 K: 1 |
| 6453 | F: 1 |
| 6636 | A: 6 B: 37 C: 11 D: 1 F: 1 G: 4 H: 1 J: 1 |
| 6660 | F: 1 K: 2 |
| 6688 | A: 1 B: 42 D: 1 G: 3 I: 3 K: 3 |
| 6727 | F: 16 G: 5 K: 103 |
| 6835 | K: 1 |
| 6865 | A: 1 I: 1 |
| 6892 | B: 23 C: 1 H: 2 I: 1 J: 12 |
| 7000 | B: 1 |
| 7041 | C: 1 F: 17 H: 1 |
| 7533 | G: 2 |
| 7535 | A: 5 |
| 7577 | F: 1 |
| 7697 | D: 10 F: 3 |
| 7712 | F: 1 K: 3 |
| 8009 | B: 2 C: 2 H: 1 |
| 8078 | F: 5 K: 20 |
| 8097 | I: 3 |
| 8166 | A: 7 B: 6 D: 8 G: 52 |
| 8262 | H: 1 |
| 8341 | A: 1 F: 2 G: 3 H: 2 I: 1 |
| 8534 | F: 1 K: 6 |
| 8666 | B: 4 D: 1 G: 16 K: 1 |
| 8671 | G: 1 K: 2 |
| 8744 | H: 1 |
| 8968 | A: 12 G: 3 H: 1 |
| 8994 | F: 1 K: 4 |
| 9297 | D: 1 |
| 9327 | K: 1 |
| 9332 | K: 4 |
| 9406 | B: 10 D: 3 H: 39 |
| 9407 | B: 10 D: 3 H: 39 |
| 9668 | F: 9 K: 41 |
| 9679 | B: 1 F: 1 K: 1 |
| 9755 | K: 5 |
| 9868 | F: 9 K: 1 |
| 10044 | A: 10 B: 10 D: 14 F: 2 G: 24 H: 5 K: 4 |
| 10322 | B: 1 F: 2 K: 3 |
| 10526 | B: 3 H: 3 |
| 10584 | A: 2 |
| 10650 | K: 3 |
| 10739 | A: 1 B: 1 G: 3 J: 1 |
| 10743 | C: 1 J: 1 |
| 10744 | A: 6 B: 3 G: 2 I: 3 |
| 10761 | H: 1 |
| 10880 | D: 1 G: 1 |
| 10942 | A: 30 |
| 11019 | F: 4 |
| 11278 | I: 1 |
| 11342 | F: 1 K: 2 |
| 11562 | F: 1 K: 4 |
| 11688 | F: 2 K: 12 |
| 11735 | A: 25 B: 57 C: 7 D: 1 F: 1 G: 1 K: 1 |
| 11813 | A: 8 |
| 12039 | B: 3 |
| 12043 | A: 6 |
| 12048 | F: 1 H: 1 |
| 12098 | A: 4 B: 8 H: 2 I: 1 |
| 12202 | K: 2 |
| 12220 | C: 2 |
| 12243 | A: 1 B: 132 C: 38 D: 31 F: 6 G: 11 |
| 12263 | H: 4 |
| 12276 | A: 18 |
| 12490 | A: 9 B: 11 C: 8 G: 4 |
| 12604 | A: 6 B: 14 C: 22 D: 1 F: 1 G: 4 H: 4 I: 1 |
| 12657 | B: 1 C: 6 J: 2 |
| 12788 | K: 2 |
| 12901 | G: 2 |
| 12907 | I: 6 |
| 13013 | D: 5 |
| 13202 | A: 2 B: 14 C: 9 D: 1 G: 3 H: 3 J: 3 K: 1 |
| 13229 | A: 3 |
| 13256 | F: 2 K: 5 |
| 13267 | I: 8 |
| 13285 | B: 1 C: 42 D: 5 I: 1 J: 10 |
| 26638 | D: 2 |
| 26710 | A: 90 B: 48 G: 27 |
| 26726 | C: 4 |
| 26786 | A: 24 |
| 26982 | A: 1 G: 1 |
| 27084 | F: 16 K: 83 |
| 27273 | C: 3 |
| 27301 | A: 3 B: 3 H: 2 |
| 27336 | B: 1 G: 1 |
| 27361 | F: 2 |
| 27374 | B: 1 D: 1 |
| 27627 | F: 1 K: 1 |
| 27697 | A: 1 C: 1 |
| 27877 | H: 1 I: 19 |
| 28413 | H: 1 |
| 28517 | K: 2 |
| 28518 | G: 3 |
| 29120 | I: 1 |
| 29469 | A: 2 G: 2 |
| 29472 | A: 1 |
| 29557 | C: 1 |
| 29673 | D: 1 |
| 29814 | A: 1 |
| 30218 | F: 7 K: 1 |
| 30446 | B: 1 C: 1 H: 10 |
| 30477 | G: 7 |
| 30583 | K: 5 |
| 30719 | A: 1 B: 9 I: 3 |
| 31356 | H: 2 |
| 31422 | G: 1 |
| 31554 | K: 1 |
| 31627 | C: 1 |
| 31726 | C: 1 |
| 31744 | F: 1 |
| 31790 | A: 25 |
| 32102 | G: 1 |
| 32473 | B: 1 |
| 32475 | B: 1 |
| 32962 | G: 1 |
| 33130 | K: 3 |
| 33712 | B: 1 C: 1 |
| 35005 | A: 1 |
| 35185 | C: 1 |
| 35258 | K: 1 |
| 35326 | B: 1 F: 3 G: 1 H: 1 I: 1 K: 3 |
| 35597 | F: 1 K: 1 |
| 35912 | A: 1 |
| 35984 | F: 1 |
| 36122 | K: 1 |
| 37337 | F: 1 K: 2 |
| 38112 | K: 1 |
| 38220 | A: 1 |
| 38311 | A: 1 |
| 38631 | K: 1 |
| 38749 | H: 1 |
| 38890 | G: 21 |
| 40163 | K: 2 |
| 40975 | B: 8 D: 1 H: 39 |
| 40991 | B: 8 D: 1 H: 39 |
| 42896 | H: 1 |
| 43190 | K: 1 |
| 44053 | C: 11 D: 1 H: 1 I: 2 J: 5 |
| 45091 | J: 1 |
| 45179 | H: 1 |
| 45274 | C: 4 H: 2 |
| 46679 | D: 3 F: 1 H: 1 |
| 47171 | C: 1 |
| 48024 | B: 4 C: 5 |
| 48548 | F: 1 |
| 48603 | F: 41 K: 19 |
| 48670 | K: 1 |
| 48671 | K: 2 |
| 48823 | C: 65 |
| 48901 | B: 1 G: 2 I: 2 |
| 49018 | B: 2 C: 2 F: 2 J: 2 |
| 49034 | D: 1 F: 2 H: 1 I: 3 K: 2 |
| 49133 | F: 4 K: 2 |
| 49140 | A: 1 C: 1 |
| 49261 | F: 3 K: 23 |
| 49387 | F: 2 K: 1 |
| 49416 | B: 18 C: 1 |
| 49426 | J: 51 |
| 49493 | C: 1 F: 1 I: 6 |
| 49640 | A: 5 F: 1 |
| 49863 | A: 6 C: 2 I: 1 |
| 49871 | A: 6 C: 2 I: 1 |
| 50015 | K: 2 |
| 50049 | K: 2 |
| 50112 | K: 3 |
| 50185 | I: 6 |
| 50241 | F: 3 H: 1 |
| 50353 | F: 1 K: 1 |
| 50763 | A: 14 |
| 50982 | A: 2 |
| 51130 | K: 2 |
| 51212 | J: 2 |
| 51346 | A: 2 B: 1 D: 1 |
| 51380 | B: 1 F: 1 |
| 51400 | F: 3 |
| 51796 | F: 1 K: 2 |
| 51954 | B: 13 C: 1 D: 1 F: 2 K: 1 |
| 52076 | A: 2 |

[1362] TABLE IV

| SEQ ID NO. in | |
|---|---|
| priority | |
| application | Tissue source |
| 37 | adenocarcinoma(2), carcinoid(2), testis(1), tonsil(1) |
| 51 | adipose tissue, white(4), cerebellum(3), cochlea(1), colon tumor rer+(2), dorsal root |
| | ganglion(1), hippocampus(1), kidney(1), liver(1), malignant melanoma, metastatic to lymph |
| | node(1), muscle(2), normal leg muscle(1), parathyroid tumor(1), pectoral muscle (after |
| | mastectomy)(1), placenta(1), substantia nigra(1), total brain(1) |
| 201 | pancreas(1) |
| 326 | ovarian tumor(1), uterus(1) |
| 440 | brain cortex(1), carcinoid tumor(1) |
| 483 | pbl(1), adenocarcinoma(1), astrocytoma(1), ovarian tumor(1), schizophrenic brain s-11 |
| | frontal lobe(1) |
| 500 | colon(4), colon tumor rer+(1), pooled germ cell tumors(1) |
| 505 | total brain(1) |
| 528 | brain(2), cerebellum(1), colon(1), ovarian tumor(6) |
| 573 | melanoma (mewo cell line)(1) |
| 587 | germinal center b cell(1), lymphoma(1), parathyroid tumor(1) |
| 593 | ovarian tumor(1), placenta(1) |
| 621 | placenta.(2) |
| 653 | 2 pooled tumors (clear cell type)(2), anaplastic oligodendroglioma(2), glioblastoma |
| | (pooled)(2) |
| 678 | ovarian tumor(1), prostate(1) |
| 693 | brain(1), placenta(1) |
| 703 | small cell carcinoma(2) |
| 746 | small cell carcinoma(1) |
| 770 | colon(1), frontal lobe(1), human pancreatic islets(1), normal leg muscle(1), ovarian tumor(1), |
| | pancreatic islet(2), senescent fibroblast(1), total brain(1) |
| 775 | anaplastic oligodendroglioma(1), frontal lobe(1) |
| 796 | adrenal adenoma(1), adrenal gland(1), breast tumor(3), placenta(2) |
| 812 | heart(1), brain(1), frontal lobe(3), neuroepithelial cells(1), retina(1), small cell carcinoma(1), |
| | total brain(1) |
| 988 | germinal center b cell(1) |
| 1064 | 2 pooled tumors (clear cell type)(1), ewing's sarcoma(2), adenocarcinoma(5), anaplastic |
| | oligodendroglioma(5), breast tumor(1), carcinoid(4), colon(3), colon tumor(1), colon tumor |
| | rer+(2), frontal lobe(4), germinal center b cell(7), kidney tumor(1), lung tumor(1), metastatic |
| | prostate bone lesion(2), ovarian tumor(6), parathyroid tumor(7), pectoral muscle (after |
| | mastectomy)(12), placenta(1), pooled germ cell tumors(4), senescent fibroblast(2), squamous |
| | cell carcinoma from base of tongue(1), tumor, 5 pooled (see description)(1) |
| 1151 | anaplastic oligodendroglioma(4), carcinoid(1), colon tumor rer+(1), medulloblastoma(1), |
| | normal prostate(1), parathyroid tumor(1), tumor(1) |
| 1190 | colon(1) |
| 1853 | 2 pooled high-grade transitional cell tumors(1), 2 pooled tumors (clear cell type)(1) |
| 2173 | 2 pooled tumors (clear cell type)(2), b-cell, chronic lymphotic leukemia(2), cd34+, cd38− |
| | from normal bone marrow donor(6), adenocarcinoma(1), alveolar rhabdomyosarcoma(1), |
| | anaplastic oligodendroglioma(3), breast(1), carcinoid(1), cerebellum(2), cochlea(3), |
| | colon(11), colon tumor rer+(2), dorsal root ganglion(1), early stage papillary serous |
| | carcinoma(1), epithelium (cell line)(1), follicular lymphoma(1), frontal lobe(15), germinal |
| | center b-cells(3), invasive adenocarcinoma(5), kidney(1), kidney tumor(2), larynx(1), |
| | liver(1), lung carcinoma(1), lymphoma(1), meningioma(1), moderately differentiated |
| | adenocarcinoma(2), moderately-differentiated adenocarcinoma(1), muscle(1), normal |
| | prostate(6), normal prostatic epithelial cells(1), oligodendroglioma(3), ovarian tumor(4), |
| | papillary serous carcinoma(1), pectoral muscle (after mastectomy)(23), pooled germ cell |
| | tumors(2), prostate(1), stem cell 34+/38+(2), thyroid(1), tumor, 5 pooled (see description)(4), |
| | two pooled squamous cell carcinomas(2) |
| 2553 | brain(2), tumor(1) |
| 2556 | brain(2), tumor(1) |
| 2755 | frontal lobe(1) |
| 2843 | b-cell, chronic lymphotic leukemia(2), anaplastic oligodendroglioma(5), carcinoid(1), |
| | placenta(1) |
| 2852 | frontal lobe(3) |
| 2932 | bone marrow(14), brain(1), hematopoietic from aml patient(1), liver(2), normal cortical |
| | stroma(1) |
| 3078 | frontal lobe(2) |
| 3280 | b-cell, chronic lymphotic leukemia(1), germinal center b cell(1), leiomyosarcoma(1), pooled |
| | germ cell tumors(1) |
| 3326 | muscle(3), normal leg muscle(1), parathyroid tumor(1) |
| 3387 | carcinoid(1), pooled germ cell tumors(4) |
| 3439 | 2 pooled tumors (clear cell type)(1), b-cell, chronic lymphotic leukemia(3), ewing's |
| | sarcoma(1), anaplastic oligodendroglioma(1), colon(2), glioblastoma (pooled)(1), mantle cell |
| | lymphoma(1), parathyroid tumor(1), senescent fibroblast(1), squamous cell carcinoma(1) |
| 3501 | anaplastic oligodendroglioma(1), breast(1), carcinoid(2), colon(1), colon tumor rer+(1), |
| | epithelium (cell line)(1), kidney tumor(1), ovarian tumor(1), parathyroid tumor(2), pooled |
| | germ cell tumors(4), senescent fibroblast(1), squamous cell carcinoma(1), testis(1), tumor(2) |
| 3633 | cerebellum(1), muscle(1), retina(4), small cell carcinoma(1), total brain(3) |
| 3714 | 2 pooled tumors (clear cell type)(1), colon(1) |
| 3804 | heart(1), anaplastic oligodendroglioma(1), carcinoid(1), colon tumor(2), germinal center b |
| | cell(2), kidney tumor(1), lung tumor(3), lymphoid(2), moderately differentiated |
| | adenocarcinoma(1), muscle(1), ovarian tumor(3), pectoral muscle (after mastectomy)(1), |
| | squamous cell carcinoma(3) |
| 3892 | blood(1), total brain(2) |
| 3985 | anaplastic oligodendroglioma(1), breast(1) |
| 4005 | 2 pooled tumors (clear cell type)(1), brain(2), germinal center b cell(1), muscle(1) |
| 4063 | cerebral cortex(1), brain(1), carcinoid(2), cerebellum(1), schizophrenic brain s-11 frontal |
| | lobe(1), senescent fibroblast(1), total brain(2) |
| 4111 | anaplastic oligodendroglioma(1), cerebellum(1), colon(1) |
| 4172 | retina(3) |
| 4340 | heart(1), blood(1), brain(2), colon(6), frontal lobe(9), invasive tumor (cell line)(1), |
| | melanocyte(1), neuroepithelial cells(1), senescent fibroblast(1), small cell carcinoma(2), total |
| | brain(3) |
| 4436 | b-cell, chronic lymphotic leukemia(1), bulk tumor(1), colon(24), early stage papillary serous |
| | carcinoma(3), lung carcinoma(1), pancreatic cancer(1), pooled germ cell tumors(1) |
| 4609 | blood(1) |
| 4647 | colon(1), liver(1) |
| 4660 | adenocarcinoma(1) |
| 4664 | 2 pooled tumors (clear cell type)(5), adenocarcinoma(3), brain(1), breast(1), colon(4), colon |
| | tumor rer+(1), frontal lobe(5), liver(1), neuroepithelial cells(1), normal prostate(1), ovarian |
| | tumor(1), ovary(1), total brain(1), tumor(1) |
| 4678 | colon tumor, rer+(2) |
| 4682 | 2 pooled tumors (clear cell type)(4), anaplastic oligodendroglioma(2), breast(3), carcinoid(1), |
| | glioblastoma (pooled)(1), pooled germ cell tumors(1) |
| 4687 | 2 pooled tumors (clear cell type)(1), carcinoid(3), colon(3), normal prostate(1), pooled germ |
| | cell tumors(1) |
| 4690 | carcinoid(1), colon(3), normal prostate(1), pooled germ cell tumors(1) |
| 4694 | colon tumor, rer+(1) |
| 4733 | colon(3), liver(14), pancreatic islet(1) |
| 4807 | 2 pooled tumors (clear cell type)(1), alveolar rhabdomyosarcoma(1), carcinoid(3), colon(2), |
| | normal prostate(2), normal prostatic epithelial cells(1), ovarian tumor(23), prostate(2), serous |
| | adenocarcinoma(1), total brain(2), tumor(1), tumor, 5 pooled (see description)(4) |
| 4809 | 2 pooled tumors (clear cell type)(1), alveolar rhabdomyosarcoma(1), carcinoid(3), colon(2), |
| | normal prostate(2), normal prostatic epithelial cells(1), ovarian tumor(28), prostate(2), serous |
| | adenocarcinoma(1), total brain(2), tumor(1), tumor, 5 pooled (see description)(5) |
| 4855 | b-cell, chronic lymphotic leukemia(1), carcinoid(1) |
| 4900 | 2 pooled tumors (clear cell type)(1), b-cell, chronic lymphotic leukemia(1), colon(1), liver(1), |
| | low-grade prostatic neoplasia(1), normal prostate(1), pooled germ cell tumors(1) |
| 4908 | alveolar rhabdomyosarcoma(1), colon(1), hemopoietic system(1), liver(1), malignant ascitic |
| | effusion(1), moderately-differentiated adenocarcinoma(1), neuroepithelial cells(1), |
| | parathyroid tumor(1), synovial membrane(1), uterus(1) |
| 4947 | parathyroid tumor(1), testis(2) |
| 5000 | 2 pooled tumors (clear cell type)(3), b-cell, chronic lymphotic leukemia(2), anaplastic |
| | oligodendroglioma(5), breast(4), carcinoid(2), colon tumor, rer+(1), germ cell tumor(1), |
| | germinal center b cell(6), invasive prostate tumor(1), lung tumor(1), metastatic prostate bone |
| | lesion(2), normal prostate(1), parathyroid tumor(2), pectoral muscle (after mastectomy)(3), |
| | pooled germ cell tumors(1), senescent fibroblast(4), stroma(1), thyroid(1), tumor, 5 pooled |
| | (see description)(2) |
| 5002 | pectoral muscle (after mastectomy)(1), senescent fibroblast(1) |
| 5005 | anaplastic oligodendroglioma(1), germinal center b cell(1), lobullar carcinoma in situ(1), |
| | lymphoma(1), oligodendroglioma(1), pooled germ cell tumors(8) |
| 5011 | breast cancer(1), normal prostate(5), seminal vesicles(1) |
| 5040 | bone marrow(18), brain(1), hematopoietic from aml patient(1), liver(2), normal cortical |
| | stroma(1) |
| 5089 | parotid gland(1) |
| 5117 | adenocarcinoma(2), breast(2), carcinoid(1), colon(3), colon tumor rer+(1), epithelium (cell |
| | line)(3), moderately differentiated adenocarcinoma(1), moderately-differentiated |
| | adenocarcinoma(2), normal prostate(3), normal prostatic epithelial cells(2), placenta(1), |
| | prostate(3), small cell carcinoma(1), squamous cell carcinoma(2), squamous cell carcinoma |
| | from base of tongue(1) |
| 5162 | hippocampus(1), schizophrenic brain s-11 frontal lobe(1) |
| 5167 | colon(3), colon tumor rer+(2), pooled germ cell tumors(1) |
| 5214 | kidney(1), ovarian tumor(1), pituitar gland(1), total brain(2) |
| 5230 | 2 pooled tumors (clear cell type)(5), placenta(1), breast(1), breast tumor(1), carcinoid(2), |
| | colon(1), colon carcinoma(1), colon mucosa(1), colon tumor rer+(4), germinal center b |
| | cell(1), kidney tumor(1), normal prostate(5), papillary serous carcinoma(1), parathyroid |
| | tumor(3), pectoral muscle (after mastectomy)(3), pooled germ cell tumors(2), senescent |
| | fibroblast(1), squamous cell carcinoma from base of tongue(1) |
| 5240 | bone(1), colon(2), frontal lobe(2), glioblastoma (pooled)(1), liver(1), ovarian tumor(1), |
| | parathyroid tumor(1), tumor, 5 pooled (see description)(1) |
| 5250 | 2 pooled tumors (clear cell type)(1), anaplastic oligodendroglioma(2), brain(5), carcinoid(1), |
| | colon(2), colon tumor rer+(1), pooled germ cell tumors(1) |
| 5262 | 2 pooled tumors (clear cell type)(1), anaplastic oligodendroglioma(2), brain(5), carcinoid(1), |
| | colon(2), colon tumor rer+(1), pooled germ cell tumors(1) |
| 5270 | ovarian tumor(1) |
| 5278 | 2 pooled tumors (clear cell type)(7), anaplastic oligodendroglioma(7), breast(1), breast |
| | tumor(4), carcinoid(3), colon(1), colon tumor rer+(2), glioblastoma (pooled)(1), liver(3), |
| | pooled germ cell tumors(6), thyroid(2) |
| 5358 | 2 pooled tumors (clear cell type)(1), anaplastic oligodendroglioma(2), brain(2), colon(2), |
| | germinal center b cell(4), melanocyte(1), normal prostate(3), parathyroid tumor(2), pectoral |
| | muscle (after mastectomy)(3), pooled germ cell tumors(4), senescent fibroblast(2) |
| 5494 | 2 pooled tumors (clear cell type)(2), cd34+, cd38− from normal bone marrow donor(2), |
| | anaplastic oligodendroglioma(2), brain(2), colon(2), colon tumor rer+(1), early stage |
| | papillary serous carcinoma(1), germinal center b cell(3), glioblastoma (pooled)(3), |
| | moderately-differentiated adenocarcinoma(1), normal prostate(1), normal prostatic epithelial |
| | cells(1), omentum(1), ovarian tumor(4), ovary(1), parathyroid tumor(3), pectoral muscle |
| | (after mastectomy)(1), pooled germ cell tumors(1), senescent fibroblast(2), stem cell |
| | 34+/38+(1), synovial membrane(1), synovial sarcoma(1), tumor(1) |
| 5499 | 2 pooled tumors (clear cell type)(1), brain(2), pancreatic islet(2) |
| 5533 | 2 pooled tumors (clear cell type)(2), anaplastic oligodendroglioma(3), breast(1), carcinoid(1), |
| | germinal center b cell(2), glioblastoma (pooled)(2), pooled germ cell tumors(2), senescent |
| | fibroblast(1), small cell carcinoma(2) |
| 5563 | colon(3), kidney(1), liver(1), neuroepithelial cells(1), normal prostatic epithelial cells(1), |
| | ovarian tumor(1), senescent fibroblast(1), total brain(1) |
| 5691 | 2 pooled high-grade transitional cell tumors(1), 2 pooled tumors (clear cell type)(3), |
| | adenocarcinoma(3), anaplastic oligodendroglioma(2), carcinoid(3), colon(2), germinal center |
| | b cell(1), glioblastoma (pooled)(3), medulloblastoma(1), ovarian tumor(1), parathyroid |
| | tumor(2), pectoral muscle (after mastectomy)(2), prostate(1), three pooled meningiomas(1), |
| | total brain(1) |
| 5748 | bone(2), anaplastic oligodendroglioma(5), breast(1), carcinoid(1), colon tumor rer+(1), |
| | frontal lobe(2), germinal center b cell(1), glioblastoma (pooled)(1), ovarian tumor(4), |
| | parathyroid tumor(2), pooled germ cell tumors(1), senescent fibroblast(1), tumor, 5 pooled |
| | (see description)(1) |
| 5806 | 2 pooled tumors (clear cell type)(4), female, 19 years old, normal leg muscle(2), alveolar |
| | rhabdomyosarcoma(1), anaplastic oligodendroglioma(4), breast(1), carcinoid(3), germinal |
| | center b cell(1), glioblastoma (pooled)(2), normal prostate(1) |
| 5816 | anaplastic oligodendroglioma(1), frontal lobe(4) |
| 5824 | 2 pooled tumors (clear cell type)(2), b-cell, chronic lymphotic leukemia(2), |
| | adenocarcinoma(1), anaplastic oligodendroglioma(3), blood(1), breast(1), carcinoid(9), |
| | cerebellum(1), colon(3), fibrotheoma(1), follicular lymphoma(1), germinal center b cell(2), |
| | glioblastoma (pooled)(2), kidney tumor(1), low-grade prostatic neoplasia(2), normal prostatic |
| | epithelial cells(1), ovarian tumor(2), parathyroid tumor(7), pooled germ cell tumors(1), |
| | senescent fibroblast(6), thyroid(1) |
| 5861 | adipose tissue, white(2), bone marrow from femur(1), carcinoid(1), epithelium(1), normal |
| | prostatic epithelial cells(1), pectoral muscle (after mastectomy)(1) |
| 5885 | 2 pooled tumors (clear cell type)(1), female, 19 years old, normal leg muscle(1), anaplastic |
| | oligodendroglioma(5), bone marrow stroma(1), colon tumor rer+(1), germinal center b |
| | cell(5), glioblastoma (pooled)(1), kidney tumor(1), melanocyte(2), moderately differentiated |
| | adenocarcinoma(1), moderately-differentiated adenocarcinoma(1), normal prostate(1), |
| | normal prostatic epithelial cells(2), ovarian tumor(2), parathyroid tumor(1), senescent |
| | fibroblast(1), three pooled meningiomas(1), tumor(1) |
| 5947 | 2 pooled tumors (clear cell type)(4), adenocarcinoma(1), colon tumor(3), intestine(1), liver(1) |
| 5970 | b-cell, chronic lymphotic leukemia(1), carcinoid(1), germinal center b cell(2), pooled germ |
| | cell tumors(3) |
| 5974 | blood(5), bone marrow(1), liver(4), reticulocyte(1) |
| 5983 | 2 pooled tumors (clear cell type)(1), adenocarcinoma(1), carcinoid(1), germinal center b |
| | cell(4), medulloblastoma(1), pooled germ cell tumors(1), tumor, 5 pooled (see description)(1) |
| 5985 | 2 pooled tumors (clear cell type)(3), b-cell, chronic lymphotic leukemia(2), anaplastic |
| | oligodendroglioma(5), breast(4), carcinoid(2), colon tumor, rer+(1), germ cell tumor(1), |
| | germinal center b cell(6), invasive prostate tumor(1), lung tumor(1), metastatic prostate bone |
| | lesion(2), normal prostate(1), parathyroid tumor(2), pectoral muscle (after mastectomy)(3), |
| | pooled germ cell tumors(1), senescent fibroblast(4), stroma(1), thyroid(1), tumor, 5 pooled |
| | (see description)(2) |
| 6011 | brain(5), carcinoid(1), frontal lobe(1), lung carcinoma(1), retina(1) |
| 6080 | 2 pooled tumors (clear cell type)(8), ewing's sarcoma(2), heart(1), adenocarcinoma(1), |
| | alveolar rhabdomyosarcoma(6), anaplastic oligodendroglioma(5), aorta(1), breast(4), bulk |
| | germ cell seminoma(2), colon(3), germinal center b cell(2), glioblastoma (pooled)(1), |
| | kidney(2), lung carcinoma(1), metastatic prostate bone lesion(4), normal prostate(1), normal |
| | prostatic epithelial cells(1), oligodendroglioma(1), ovary(2), parathyroid tumor(5), pectoral |
| | muscle (after mastectomy)(19), pooled germ cell tumors(1), prostate(1), senescent |
| | fibroblast(4), tumor, 5 pooled (see description)(1) |
| 6081 | brain(1), germinal center b cell(1), testis(1) |
| 6108 | 2 pooled tumors (clear cell type)(1), carcinoid(1), germinal center b cell(1), parathyroid |
| | tumor(1) |
| 6159 | 2 pooled tumors (clear cell type)(2), ewing's sarcoma(1), schwannoma tumor(1), adipose |
| | tissue, white(1), adrenal adenoma(3), amygdala(1), anaplastic oligodendroglioma(1), |
| | astrocytoma(2), bone marrow stroma(3), borderline ovarian carcinoma(1), cochlea(3), colon |
| | tumor(1), epithelium (cell line)(4), frontal lobe(3), germinal center b cell(1), human |
| | pancreatic islets(1), kidney tumor(3), larynx(1), liver(1), lung carcinoma(1), lung tumor(1), |
| | normal leg muscle(1), oligodendroglioma(1), ovarian tumor(8), parathyroid tumor(1), |
| | pectoral muscle (after mastectomy)(8), prostate tumor(1), senescent fibroblast(3), small cell |
| | carcinoma(4) |
| 6231 | adenocarcinoma(2), breast(3), colon(4), colon tumor(2), endometrioid ovarian metastasis(1), |
| | epithelium (cell line)(22), frontal lobe(1), germ cell tumor(3), invasive tumor (cell line)(13), |
| | moderately differentiated adenocarcinoma(1), normal prostatic epithelial cells(1), ovarian |
| | tumor(4), ovary(1), pancreatic islet(1), placenta(trophoblast)(1), pooled germ cell tumors(2), |
| | squamous cell carcinoma(1), synovial sarcoma(1), tumor(3), tumor, 5 pooled (see |
| | description)(2), two pooled squamous cell carcinomas(2) |
| 6238 | bone(1), colon(2), ovarian tumor(2), small cell carcinoma(2), total brain(1) |
| 6252 | 2 pooled tumors (clear cell type)(1), ewing's sarcoma(6), adenocarcinoma(1), alveolar |
| | rhabdomyosarcoma(3), anaplastic oligodendroglioma(2), brain(1), breast(2), breast tumor(1), |
| | carcinoid(2), cochlea(2), germ cell tumor(1), glioblastoma (pooled)(1), kidney(1), kidney |
| | tumor(6), liposarcoma(1), lung carcinoma(1), lymphoma(1), metastatic prostate bone |
| | lesion(6), muscle(1), normal prostate(1), normal prostatic epithelial cells(1), ovarian |
| | tumor(2), ovary(4), parathyroid tumor(1), pectoral muscle (after mastectomy)(5), pooled |
| | germ cell tumors(4), prostate(1), renal celll tumor(1), senescent fibroblast(3), stem cells(1), |
| | tumor, 5 pooled (see description)(4) |
| 6290 | 2 pooled tumors (clear cell type)(1), b-cell, chronic lymphotic leukemia(1), heart(3), |
| | lymphoma(1), adenocarcinoma(1), adipose tissue, white(1), brain(3), carcinoid(5), |
| | cerebellum(5), colon(8), epithelium (cell line)(1), frontal lobe(1), germinal center b-cells(1), |
| | kidney tumor(1), medulloblastoma(1), melanoma (mewo cell line)(1), normal prostate(1), |
| | omentum(1), ovarian tumor(1), pancreatic islet(1), placenta(3), pooled frontal lobe(1), |
| | retina(1), retinal fovaea(1), schizophrenic brain s-11 frontal lobe(1), senescent fibroblast(1), |
| | small cell carcinoma(3), synovial membrane(1), total brain(2) |
| 6322 | b-cell, chronic lymphotic leukemia(1), heart(4), lymphoma(1), adipose tissue, white(1), |
| | brain(3), carcinoid(4), cerebellum(5), colon(8), epithelium (cell line)(1), frontal lobe(1), |
| | germinal center b-cells(1), kidney tumor(1), melanoma (mewo cell line)(1), omentum(1), |
| | ovarian tumor(1), pancreatic islet(1), placenta(3), pooled frontal lobe(1), retinal fovaea(1), |
| | schizophrenic brain s-11 frontal lobe(1), senescent fibroblast(1), small cell carcinoma(3), |
| | synovial membrane(1), total brain(2) |
| 6329 | b-cell, chronic lymphotic leukemia(3), heart(3), lymphoma(2), adenocarcinoma(6), adipose |
| | tissue, white(1), adrenal adenoma(2), anaplastic oligodendroglioma(2), bone marrow |
| | stroma(1), brain(2), breast(1), carcinoid(7), cerebellum(5), colon(8), epithelium (cell line)(1), |
| | frontal lobe(1), germ cell tumor(2), germinal center b-cells(1), kidney tumor(1), larynx(1), |
| | lung tumor(1), medulloblastoma(1), melanoma (mewo cell line)(1), metastatic melanoma to |
| | bowel(1), moderately differentiated adenocarcinoma(1), normal prostate(2), omentum(1), |
| | ovarian tumor(1), pancreatic islet(2), papillary serous ovarian metastasis(1), parathyroid |
| | tumor(1), pectoral muscle (after mastectomy)(1), placenta(2), pooled frontal lobe(1), pooled |
| | germ cell tumors(3), prostate(1), retinal fovaea(1), schizophrenic brain s-11 frontal lobe(1), |
| | senescent fibroblast(3), small cell carcinoma(5), squamous cell carcinoma(1), synovial |
| | membrane(1), total brain(2), tumor(1), tumor, 5 pooled (see description)(1), two pooled |
| | squamous cell carcinomas(1) |
| 6334 | 2 pooled tumors (clear cell type)(3), b-cell, chronic lymphotic leukemia(2), anaplastic |
| | oligodendroglioma(9), glioblastoma (pooled)(3), kidney(1), normal prostate(3), ovarian |
| | tumor(1), senescent fibroblast(2) |
| 6345 | testis(3) |
| 6350 | 2 pooled tumors (clear cell type)(2), b-cell, chronic lymphotic leukemia(1), bone(1), |
| | adenocarcinoma(1), anaplastic oligodendroglioma(10), breast(1), breast tumor(1), colon(2), |
| | glioblastoma (pooled)(6), kidney(1), lung carcinoma(1), medulloblastoma(1), metastatic |
| | prostate bone lesion(1), normal prostate(1), pectoral muscle (after mastectomy)(4), pooled |
| | germ cell tumors(2), senescent fibroblast(2), squamous cell carcinoma(1), testis(1), tumor(1), |
| | tumor, 5 pooled (see description)(1) |
| 6358 | 2 pooled tumors (clear cell type)(2), anaplastic oligodendroglioma(4), brain(4), carcinoid(2), |
| | colon(3), colon tumor rer+(1), germinal center b cell(4), glioblastoma (pooled)(2), normal |
| | prostate(1), normal prostatic epithelial cells(1), parathyroid tumor(2), pectoral muscle (after |
| | mastectomy)(1), senescent fibroblast(3) |
| 6384 | epithelium(1), meningioma(1), parathyroid tumor(2), senescent fibroblast(1) |
| 6400 | blood(2), brain(2), colon(6), parathyroid tumor(1), tumor(1) |
| 6431 | adenocarcinoma(1) |
| 6453 | pooled germ cell tumors(3) |
| 6636 | 2 pooled tumors (clear cell type)(1), ewing's sarcoma(2), adenocarcinoma(3), anaplastic |
| | oligodendroglioma(3), breast tumor(1), carcinoid(4), colon(2), colon tumor(1), colon tumor |
| | rer+(2), frontal lobe(3), germinal center b cell(6), kidney tumor(1), ovarian tumor(4), |
| | parathyroid tumor(4), pectoral muscle (after mastectomy)(10), placenta(1), pooled germ cell |
| | tumors(2), senescent fibroblast(1), squamous cell carcinoma from base of tongue(1), tumor, 5 |
| | pooled (see description)(1) |
| 6688 | b-cell, chronic lymphotic leukemia(3), alveolar rhabdomyosarcoma(1), anaplastic |
| | oligodendroglioma(1), breast(2), carcinoid(1), colon(1), colon tumor(1), four pooled pituitary |
| | adenomas(1), germinal center b cell(2), glioblastoma (pooled)(1), kidney tumor(2), |
| | moderately-differentiated adenocarcinoma(1), muscle(2), pectoral muscle (after |
| | mastectomy)(1), pooled germ cell tumors(3), senescent fibroblast(3), synovial sarcoma(1), |
| | testis(1), tumor, 5 pooled (see description)(3) |
| 6727 | frontal lobe(1), schizophrenic brain s-11 frontal lobe(1) |
| 6865 | frontal lobe(4), germinal center b cell(1), muscle(1), ovarian tumor(2), pectoral muscle (after |
| | mastectomy)(3), senescent fibroblast(1), small cell carcinoma(1), thyroid(1) |
| 6892 | 2 pooled tumors (clear cell type)(5), adenocarcinoma(1), anaplastic oligodendroglioma(5), |
| | brain(5), breast(3), breast tumor(1), carcinoid(5), cerebellum(1), colon(3), colon tumor |
| | rer+(2), frontal lobe(5), germinal center b cell(3), glioblastoma (pooled)(2), moderately- |
| | differentiated adenocarcinoma(1), normal prostate(3), ovary(2), parathyroid tumor(3), |
| | pectoral muscle (after mastectomy)(1), placenta(1), pooled germ cell tumors(5), senescent |
| | fibroblast(3), tumor(1), tumor, 5 pooled (see description)(1) |
| 7000 | anaplastic oligodendroglioma(2), frontal lobe(2) |
| 7041 | germinal center b cell(1), total brain(2) |
| 7533 | 2 pooled tumors (clear cell type)(1), b-cell, chronic lymphotic leukemia(1), schwannoma |
| | tumor(1), anaplastic oligodendroglioma(1), astrocytoma(1), breast(1), cochlea(1), colon |
| | tumor rer+(2), germ cell tumor(1), germinal center b cell(2), glioblastoma (pooled)(3), |
| | hepatoma(4), medulloblastoma(1), metastatic prostate bone lesion(1), moderately- |
| | differentiated adenocarcinoma(1), ovarian tumor(1), prostate tumor(1), senescent |
| | fibroblast(1), squamous cell carcinoma(1), three pooled meningiomas(1) |
| 7535 | b-cell, chronic lymphotic leukemia(1), schwannoma tumor(1), anaplastic |
| | oligodendroglioma(1), astrocytoma(1), breast(1), cochlea(1), colon tumor rer+(2), germ cell |
| | tumor(1), germinal center b cell(2), glioblastoma (pooled)(3), hepatoma(4), |
| | medulloblastoma(1), metastatic prostate bone lesion(1), moderately-differentiated |
| | adenocarcinoma(1), ovarian tumor(1), senescent fibroblast(1), squamous cell carcinoma(1) |
| 7697 | colon(1), invasive adenocarcinoma(3), liver(1), moderately-differentiated adenocarcinoma(1) |
| 8009 | alveolar rhabdomyosarcoma(2), anaplastic oligodendroglioma(1), carcinoid(9), colon(1), |
| | colon tumor rer+(1), germinal center b cell(2), glioblastoma (pooled)(1), normal prostate(1), |
| | ovary(2), pooled germ cell tumors(2), thyroid(2), tumor(1) |
| 8078 | frontal lobe(2) |
| 8079 | b-cell, chronic lymphotic leukemia(2), bone(1), anaplastic oligodendroglioma(1), colon(1), |
| | pooled germ cell tumors(3) |
| 8097 | colon(1) |
| 8166 | 2 pooled tumors (clear cell type)(5), adenocarcinoma(6), anaplastic oligodendroglioma(3), |
| | breast tumor(1), carcinoid(1), colon(1), epithelium (cell line)(1), glioblastoma (pooled)(2), |
| | lung tumor(2), metastatic melanoma to bowel(1), moderately-differentiated |
| | adenocarcinoma(1), normal prostate(1), ovary(1), papillary serous ovarian metastasis(1), |
| | parathyroid tumor(1), pooled germ cell tumors(4), renal cell tumor(1), squamous cell |
| | carcinoma(5), synovial sarcoma(1), tumor(3), tumor, 5 pooled (see description)(3) |
| 8341 | 2 pooled tumors (clear cell type)(1), anaplastic oligodendroglioma(2), germinal center b |
| | cell(3), glioblastoma (pooled)(1), normal prostate(1), oligodendroglioma(1), pectoral muscle |
| | (after mastectomy)(2), tumor(1) |
| 8534 | germinal center b cell(4) |
| 8666 | 2 pooled high-grade transitional cell tumors(1), 2 pooled tumors (clear cell type)(5), b-cell, |
| | chronic lymphotic leukemia(2), adenocarcinoma(3), alveolar rhabdomyosarcoma(3), |
| | amygdala(1), anaplastic oligodendroglioma(3), blood(2), breast(1), carcinoid(3), colon(3), |
| | germinal center b cell(4), muscle(1), normal prostate(1), ovarian tumor(6), parathyroid |
| | tumor(2), pectoral muscle (after mastectomy)(4), pheochromocytoma(1), placenta(1), |
| | senescent fibroblast(11), two pooled squamous cell carcinomas(1) |
| 8671 | 2 pooled high-grade transitional cell tumors(1), 2 pooled tumors (clear cell type)(3), b-cell, |
| | chronic lymphotic leukemia(1), adenocarcinoma(6), alveolar rhabdomyosarcoma(3), |
| | amygdala(2), anaplastic oligodendroglioma(2), blood(2), breast(2), carcinoid(1), colon(2), |
| | germinal center b cell(5), liver cancer(1), metastatic prostate bone lesion(1), muscle(1), |
| | normal prostate(1), ovarian tumor(5), parathyroid tumor(2), pectoral muscle (after |
| | mastectomy)(5), placenta(2), pooled germ cell tumors(1), renal cell tumor(1), senescent |
| | fibroblast(8) |
| 8968 | b-cell, chronic lymphotic leukemia(1), neuroepithelial cells(1), total brain(1) |
| 9406 | brain(2), colon(1), tumor(1) |
| 9407 | brain(2), colon(1), tumor(1) |
| 9668 | 2 pooled tumors (clear cell type)(8), adenocarcinoma(1), anaplastic oligodendroglioma(1), |
| | breast carcinoma in situ(3), cerebellum(1), oligodendroglioma(1), papillary serous |
| | carcinoma(2), parathyroid tumor(26), pooled germ cell tumors(1) |
| 9679 | ovarian tumor(3), parathyroid tumor(1), uterus(1) |
| 9755 | 2 pooled tumors (clear cell type)(1), adenocarcinoma(1), carcinoid(1), ovarian tumor(1), |
| | pooled germ cell tumors(3), senescent fibroblast(2), total brain(2) |
| 9868 | brain(1), senescent fibroblast(1) |
| 10044 | 2 pooled high-grade transitional cell tumors(1), 2 pooled tumors (clear cell type)(3), b-cell, |
| | chronic lymphotic leukemia(1), adenocarcinoma(6), alveolar rhabdomyosarcoma(3), |
| | amygdala(2), anaplastic oligodendroglioma(2), blood(1), breast(2), carcinoid(1), colon(2), |
| | germinal center b cell(5), liver cancer(1), metastatic prostate bone lesion(1), normal |
| | prostate(1), osteosarcoma(1), ovarian tumor(5), parathyroid tumor(2), pectoral muscle (after |
| | mastectomy)(5), placenta(2), pooled germ cell tumors(1), renal cell tumor(1), senescent |
| | fibroblast(8) |
| 10322 | 2 pooled tumors (clear cell type)(9), b-cell, chronic lymphotic leukemia(2), anaplastic |
| | oligodendroglioma(4), breast(1), carcinoid(3), colon(3), colon tumor rer+(1), germinal center |
| | b cell(1), glioblastoma (pooled)(4), kidney tumor(1), low-grade prostatic neoplasia(1), |
| | metastatic melanoma to bowel(1), normal prostate(2), ovary bulk tumor(1), parathyroid |
| | tumor(3), pectoral muscle (after mastectomy)(3), pooled germ cell tumors(2), senescent |
| | fibroblast(2), small cell carcinoma(2), synovial sarcoma(2), two pooled squamous cell |
| | carcinomas(3) |
| 10526 | 2 pooled tumors (clear cell type)(2), ewing's sarcoma(4), adenocarcinoma(1), adipose tissue, |
| | white(1), alveolar rhabdomyosarcoma(3), anaplastic oligodendroglioma(5), brain(1), |
| | breast(4), breast tumor(1), carcinoid(2), colon(10), epithelium (cell line)(1), frontal lobe(7), |
| | germ cell tumor(1), glioblastoma (pooled)(1), invasive prostate tumor(1), kidney tumor(8), |
| | lymphoma(4), metastatic prostate bone lesion(2), muscle(3), normal prostate(2), normal |
| | prostatic epithelial cells(3), ovarian tumor(1), ovary(2), parathyroid tumor(4), pectoral |
| | muscle (after mastectomy)(26), placenta(1), pooled germ cell tumors(6), prostate(9), |
| | senescent fibroblast(6), small cell carcinoma(1), tumor, 5 pooled (see description)(2) |
| 10584 | 2 pooled tumors (clear cell type)(2), b-cell, chronic lymphotic leukemia(4), anaplastic |
| | oligodendroglioma(6), carcinoid(2), colon(3), colon tumor rer+(4), colon tumor, rer+(2), |
| | ovarian tumor(4) |
| 10650 | pooled germ cell tumors(2) |
| 10739 | 2 pooled tumors (clear cell type)(5), ewing's sarcoma(1), liver(1), alveolar |
| | rhabdomyosarcoma(1), anaplastic oligodendroglioma(7), breast(3), breast tumor(1), |
| | carcinoid(9), colon(5), colon tumor rer+(3), frontal lobe(8), germinal center b cell(3), |
| | glioblastoma (pooled)(11), invasive prostate tumor(1), kidney(1), metastatic prostate bone |
| | lesion(1), moderately-differentiated adenocarcinoma(1), normal prostate(2), normal prostatic |
| | epithelial cells(1), parathyroid tumor(4), pectoral muscle (after mastectomy)(6), placenta(1), |
| | pooled germ cell tumors(1), tumor(1), tumor, 5 pooled (see description)(1) |
| 10743 | 2 pooled tumors (clear cell type)(5), ewing's sarcoma(1), liver(1), schwannoma tumor(1), |
| | alveolar rhabdomyosarcoma(1), anaplastic oligodendroglioma(7), breast(3), breast tumor(1), |
| | carcinoid(10), colon(5), colon tumor rer+(3), germinal center b cell(3), glioblastoma |
| | (pooled)(11), invasive prostate tumor(1), kidney(1), liver(1), metastatic prostate bone |
| | lesion(1), moderately-differentiated adenocarcinoma(1), muscle(1), normal prostate(2), |
| | normal prostatic epithelial cells(1), ovarian tumor(4), parathyroid tumor(4), pectoral muscle |
| | (after mastectomy)(6), placenta(1), pooled germ cell tumors(2), thyroid(1), tumor(1), tumor, |
| | 5 pooled (see description)(1) |
| 10744 | heart(2), four pooled pituitary adenomas(1), frontal lobe(3), glioblastoma (pooled)(1), |
| | liver(1), moderately-differentiated adenocarcinoma(1), peripheral blood(1), retina(1) |
| 10880 | 2 pooled tumors (clear cell type)(3), ewing's sarcoma(1), adenocarcinoma(3), brain(1), |
| | carcinoid(8), germinal center b cell(1), glioblastoma (pooled)(5), kidney tumor(1), normal |
| | prostate(3), oligodendroglioma(1), parathyroid tumor(11), senescent fibroblast(4), three |
| | pooled meningiomas(1), total brain(3) |
| 10942 | 2 pooled tumors (clear cell type)(8), adenocarcinoma(1), anaplastic oligodendroglioma(1), |
| | breast carcinoma in situ(3), cerebellum(1), oligodendroglioma(1), papillary serous |
| | carcinoma(2), parathyroid tumor(26), pooled germ cell tumors(1) |
| 11019 | epidermis(1), ewing's sarcoma(2), heart(1), schwannoma tumor(1), adenocarcinoma(5), |
| | alveolar rhabdomyosarcoma(3), amygdala(1), brain(4), carcinoid(1), colon mucosa(1), |
| | endometrioid ovarian metastasis(1), epithelium (cell line)(2), frontal lobe(1), germ cell |
| | tumor(3), heart(1), invasive prostate tumor(2), kidney(2), kidney tumor(2), liposarcoma(1), |
| | liver(24), mantle cell lymphoma(3), medulloblastoma(1), metastatic prostate bone lesion(6), |
| | moderately-differentiated adenocarcinoma(1), muscle(1), normal prostatic epithelial cells(5), |
| | ovary(1), papillary serous ovarian metastasis(1), parathyroid tumor(1), placenta(2), pooled |
| | germ cell tumors(2), prostate(1), thyroid(1), tumor(1), tumor, 5 pooled (see description)(1), |
| | uterus(4) |
| 11278 | 2 pooled tumors (clear cell type)(4), bone(4), heart(2), anaplastic oligodendroglioma(4), |
| | carcinoid(3), colon tumor rer+(1), epithelium (cell line)(1), frontal lobe(12), kidney(2), |
| | liposarcoma(1), liver(6), lung carcinoma(1), muscle(6), normal prostate(2), ovary(2), |
| | parathyroid tumor(6), pectoral muscle (after mastectomy)(3), schizophrenic brain s-11 frontal |
| | lobe(1), senescent fibroblast(6), small cell carcinoma(4), synovial membrane(1) |
| 11342 | 2 pooled tumors (clear cell type)(3), blood(1), germinal center b cell(4), normal |
| | epithelium(1), pooled germ cell tumors(1), tumor, 5 pooled (see description)(1) |
| 11735 | adenocarcinoma(1), breast(2), colon(1), frontal lobe(2), placenta(1), pooled germ cell |
| | tumors(8) |
| 12039 | testis(1) |
| 12043 | spleen(1) |
| 12048 | 2 pooled tumors (clear cell type)(1), anaplastic oligodendroglioma(1), brain(2), colon tumor |
| | rer+(2), spleen(2) |
| 12098 | astrocytoma(1), ovarian tumor(1) |
| 12202 | 2 pooled tumors (clear cell type)(2), adenocarcinoma(1), cochlea(1), germinal center b |
| | cell(2), pituitary(1) |
| 12243 | alveolar rhabdomyosarcoma(2), anaplastic oligodendroglioma(1), carcinoid(9), colon(1), |
| | colon tumor rer+(1), germinal center b cell(2), glioblastoma (pooled)(2), metastatic prostate |
| | bone lesion(1), normal prostate(2), ovary(2), pooled germ cell tumors(2), thyroid(2), |
| | tumor(1) |
| 12263 | anaplastic oligodendroglioma(1), carcinoid(1), germinal center b cell(2), invasive |
| | adenocarcinoma(1), liver and spleen(2), papillary serous carcinoma(1) |
| 12490 | 2 pooled tumors (clear cell type)(3), b-cell, chronic lymphotic leukemia(1), ewing's |
| | sarcoma(1), adenocarcinoma(2), anaplastic oligodendroglioma(1), germinal center b cell(2), |
| | kidney tumor(1), larynx(1), mantle cell lymphoma(1), medulloblastoma(1), melanocyte(2), |
| | moderately-differentiated adenocarcinoma(1), ovarian tumor(12), parathyroid tumor(2), |
| | pooled germ cell tumors(4), prostate(2), tumor, 5 pooled (see description)(2) |
| 12604 | 2 pooled tumors (clear cell type)(12), b-cell, chronic lymphotic leukemia(4), bone(1), ewing's |
| | sarcoma(1), adenocarcinoma(1), anaplastic oligodendroglioma(10), carcinoid(3), colon(3), |
| | colon tumor rer+(1), germinal center b cell(1), glioblastoma (pooled)(3), invasive prostate |
| | tumor(1), kidney(1), larynx(1), muscle(1), normal leg muscle(1), normal prostate(3), ovarian |
| | tumor(1), parathyroid tumor(12), pectoral muscle (after mastectomy)(28), pooled germ cell |
| | tumors(3), prostate(3), renal cell tumor(1), senescent fibroblast(12), skeletal muscle(1) |
| 12657 | adenocarcinoma(1), carcinoid(2), colon tumor, rer+(2) |
| 12788 | 2 pooled tumors (clear cell type)(3), adenocarcinoma(1), adrenal adenoma(1), alveolar |
| | rhabdomyosarcoma(1), carcinoid(1), colon(1), colon tumor rer+(1), germinal center b cell(1), |
| | glioblastoma (pooled)(2), ovary(1), parathyroid tumor(1), senescent fibroblast(2), tumor, 5 |
| | pooled (see description)(1) |
| 12901 | anaplastic oligodendroglioma(2), carcinoid(1), germinal center b cell(6), invasive tumor (cell |
| | line)(1), parathyroid tumor(1) |
| 12907 | adipose tissue, white(1), carcinoid(1), parathyroid tumor(2), pooled frontal lobe(1), tumor, 5 |
| | pooled (see description)(1) |
| 13013 | invasive tumor (cell line)(1), parathyroid tumor(3) |
| 13202 | 2 pooled tumors (clear cell type)(1), b-cell, chronic lymphotic leukemia(3), breast(1), breast |
| | tumor(1), carcinoid(2), colon tumor rer+(1), colon tumor, rer+(1), germinal center b cell(1), |
| | kidney tumor(1), lung carcinoma(1), lung tumor(1), meningioma(2), moderately |
| | differentiated adenocarcinoma(1), normal prostate(3), ovarian tumor(1), squamous cell |
| | carcinoma(1), tumor, 5 pooled (see description)(1) |
| 13229 | cochlea(1), frontal cortex(1), pooled germ cell tumors(1) |
| 13256 | 2 pooled tumors (clear cell type)(2), adenocarcinoma(2), anaplastic oligodendroglioma(1), |
| | parathyroid tumor(1), pooled germ cell tumors(3) |
| 13285 | 2 pooled tumors (clear cell type)(6), carcinoid(1), colon tumor rer+(1), kidney(1), liver(1) |
| 26710 | 2 pooled tumors (clear cell type)(1), pooled germ cell tumors(1) |
| 27273 | anaplastic oligodendroglioma(1), cerebellum(1), germinal center b cell(2), moderately- |
| | differentiated adenocarcinoma(1), pectoral muscle (after mastectomy)(2) |
| 27301 | astrocytoma(2), ovarian tumor(1) |
| 27336 | 2 pooled tumors (clear cell type)(2), b-cell, chronic lymphotic leukemia(6), |
| | adenocarcinoma(1), anaplastic oligodendroglioma(9), carcinoid(6), colon(1), colon tumor |
| | rer+(1), colon tumor, rer+(6), frontal lobe(1), germinal center b cell(2), glioblastoma |
| | (pooled)(1), pooled germ cell tumors(4), senescent fibroblast(2) |
| 27361 | colon(1) |
| 27374 | b-cell, chronic lymphotic leukemia(1), pooled germ cell tumors(5) |
| 27627 | 2 pooled tumors (clear cell type)(1), anaplastic oligodendroglioma(1), frontal lobe(1), |
| | germinal center b cell(1), glioblastoma (pooled)(2), ovarian tumor(1) |
| 27697 | skeletal muscle(2), thyroid(1) |
| 27877 | carcinoid(1), colon(1), germinal center b cell(1) |
| 29469 | frontal lobe(4), germinal center b cell(1), ovarian tumor(2), pectoral muscle (after |
| | mastectomy)(3), senescent fibroblast(1), small cell carcinoma(1), thyroid(1) |
| 29557 | ewing's sarcoma(1), larynx(1), medulloblastoma(1), moderately-differentiated |
| | adenocarcinoma(1), ovarian tumor(7), parathyroid tumor(2), pooled germ cell tumors(1), |
| | prostate(1) |
| 29673 | heart(1), colon tumor(1), kidney tumor(1), lung tumor(3), lymphoid(2), moderately |
| | differentiated adenocarcinoma(1), muscle(1), ovarian tumor(3), squamous cell carcinoma(1) |
| 29814 | brain(2), colon(1), pancreatic islet(1) |
| 30218 | small cell carcinoma(2) |
| 30446 | adenocarcinoma(2), adrenal adenoma(3), colon tumor(1), glioblastoma (pooled)(2), kidney |
| | tumor(1), ovarian tumor(1), parathyroid tumor(1), prostate(1), small cell carcinoma(1) |
| 30583 | carcinoid(1), ovarian tumor(1), pooled germ cell tumors(2) |
| 30719 | 2 pooled tumors (clear cell type)(3), b-cell, chronic lymphotic leukemia(1), breast(2), |
| | colon(1), colon tumor, rer+(1), germinal center b cell(1), glioblastoma (pooled)(3), liver(2), |
| | normal prostate(2), pooled germ cell tumors(10) |
| 31356 | pooled germ cell tumors(1) |
| 31422 | 2 pooled tumors (clear cell type)(1), b-cell, chronic lymphotic leukemia(2), bone(1), |
| | anaplastic oligodendroglioma(11), bone marrow stroma(1), brain(2), breast(1), carcinoid(20), |
| | colon(6), colon tumor, rer+(1), germinal center b cell(2), glioblastoma (pooled)(3), kidney |
| | tumor(1), larynx(1), medulloblastoma(1), normal prostate(1), ovarian tumor(1), parathyroid |
| | tumor(1), pectoral muscle (after mastectomy)(2), pooled germ cell tumors(2), senescent |
| | fibroblast(5), tumor(1), tumor, 5 pooled (see description)(3) |
| 31554 | 2 pooled tumors (clear cell type)(1), carcinoid(1), germinal center b cell(4) |
| 31627 | 2 pooled tumors (clear cell type)(1), alveolar rhabdomyosarcoma(1), anaplastic |
| | oligodendroglioma(2), frontal lobe(7), normal prostate(1), oligodendroglioma(1), parathyroid |
| | tumor(1), pectoral muscle (after mastectomy)(3), pooled germ cell tumors(1) |
| 31744 | adenocarcinoma(1) |
| 31790 | ovarian tumor(1), synovial membrane(1) |
| 32102 | 2 pooled tumors (clear cell type)(1), b-cell, chronic lymphotic leukemia(2), heart(3), |
| | lymphoma(2), adenocarcinoma(6), adipose tissue, white(1), anaplastic oligodendroglioma(5), |
| | brain(2), carcinoid(9), cerebellum(5), colon(7), epithelium (cell line)(1), frontal lobe(4), germ |
| | cell tumor(1), glioblastoma (pooled)(3), juvenile granulosa tumor(1), kidney tumor(2), |
| | medulloblastoma(1), melanoma (mewo cell line)(1), metastatic melanoma to bowel(1), |
| | moderately-differentiated adenocarcinoma(1), normal epithelium(1), normal prostate(3), |
| | omentum(1), ovarian tumor(2), pancreatic islet(1), parathyroid tumor(4), pectoral muscle |
| | (after mastectomy)(2), placenta(1), pooled frontal lobe(1), pooled germ cell tumors(1), retinal |
| | fovaea(1), schizophrenic brain s-11 frontal lobe(1), senescent fibroblast(5), small cell |
| | carcinoma(4), synovial membrane(1), total brain(2), tumor, 5 pooled (see description)(1), two |
| | pooled squamous cell carcinomas(2) |
| 32473 | 2 pooled tumors (clear cell type)(3), heart(1), adipose tissue, white(1), alveolar |
| | rhabdomyosarcoma(3), anaplastic oligodendroglioma(3), breast(2), colon(2), colon tumor |
| | rer+(1), invasive prostate tumor(1), kidney(1), metastatic prostate bone lesion(1), normal |
| | prostate(1), pectoral muscle (after mastectomy)(22), pooled germ cell tumors(2), senescent |
| | fibroblast(1) |
| 32475 | 2 pooled tumors (clear cell type)(3), heart(1), adipose tissue, white(1), alveolar |
| | rhabdomyosarcoma(3), anaplastic oligodendroglioma(3), breast(2), colon(2), colon tumor |
| | rer+(1), kidney(1), metastatic prostate bone lesion(1), normal prostate(1), pectoral muscle |
| | (after mastectomy)(22), pooled germ cell tumors(2), senescent fibroblast(1) |
| 33712 | 2 pooled tumors (clear cell type)(1), adenocarcinoma(2), anaplastic oligodendroglioma(4), |
| | brain frontal cortex(2), breast(1), germinal center b cell(4), juvenile granulosa tumor(1), |
| | normal prostatic epithelial cells(2), ovarian tumor(1), three pooled meningiomas(2) |
| 35005 | bone(1), pooled germ cell tumors(1) |
| 35185 | spinal cord(1) |
| 35326 | brain(1), breast(2), carcinoid(1), colon(1), germinal center b cell(2), human pancreatic |
| | islets(1), liver(1), melanocyte(1), ovarian tumor(1), placenta(1), total brain(1) |
| 37337 | anaplastic oligodendroglioma(2), colon(2), glioblastoma (pooled)(3), juvenile granulosa |
| | tumor(1), pooled germ cell tumors(3), tumor, 5 pooled (see description)(1), uterus(2) |
| 38220 | 2 pooled tumors (clear cell type)(1), b-cell, chronic lymphotic leukemia(1), |
| | adenocarcinoma(2), breast(1), carcinoid(1), frontal lobe(1), germinal center b cell(2), normal |
| | prostate(1), normal prostatic epithelial cells(1), pooled germ cell tumors(3), total brain(2) |
| 38311 | bone(1), frontal lobe(1), germinal center b cell(1), moderately differentiated |
| | adenocarcinoma(1), placenta(1) |
| 38631 | brain(1) |
| 38749 | 2 pooled tumors (clear cell type)(4), breast(1), cochlea(1), colon tumor rer+(1), liver(1), |
| | moderately differentiated adenocarcinoma(1), normal prostate(1), pancreas (with no medical |
| | abnormalities)(1), parathyroid tumor(1), prostate(1) |
| 40975 | brain(2), tumor(1) |
| 40991 | brain(2), tumor(1) |
| 44053 | 2 pooled tumors (clear cell type)(1), bone(1), total brain(1) |
| 45179 | colon(1), metastatic prostate bone lesion(1) |
| 45274 | 2 pooled tumors (clear cell type)(6), cd34+, cd38− from normal bone marrow donor(1), |
| | ewing's sarcoma(1), heart(1), lung(1), adenocarcinoma(8), adrenal adenoma(1), alveolar |
| | rhabdomyosarcoma(3), anaplastic oligodendroglioma(5), borderline ovarian carcinoma(17), |
| | brain(3), breast(4), breast carcinoma in situ(20), bronchioalveolar carcinoma(4), carcinoid(4), |
| | cerebellum(1), colon(4), colon tumor rer+(3), early stage papillary serous carcinoma(3), |
| | glioblastoma (pooled)(2), invasive adenocarcinoma(8), invasive carcinoma(2), lobullar |
| | carcinoma in situ(2), low-grade prostatic neoplasia(1), lung carcinoma(1), lung tumor(1), |
| | normal prostate(2), normal prostatic epithelial cells(1), oligodendroglioma(3), ovarian |
| | tumor(2), papillary serous carcinoma(18), papillary serous ovarian metastasis(1), parathyroid |
| | tumor(5), pectoral muscle (after mastectomy)(7), pooled germ cell tumors(2), senescent |
| | fibroblast(3), stem cell 34+/38+(2), thymus(1) |
| 46679 | 2 pooled tumors (clear cell type)(4), anaplastic oligodendroglioma(1), pectoral muscle (after |
| | mastectomy)(1), pooled germ cell tumors(1) |
| 48024 | 2 pooled tumors (clear cell type)(3), heart(1), adipose tissue, white(1), alveolar |
| | rhabdomyosarcoma(3), anaplastic oligodendroglioma(3), breast(2), colon(2), colon tumor |
| | rer+(1), invasive prostate tumor(1), kidney(1), metastatic prostate bone lesion(1), normal |
| | prostate(1), pectoral muscle (after mastectomy)(22), pooled germ cell tumors(2), senescent |
| | fibroblast(1) |
| 48548 | liver(4) |
| 48823 | 2 pooled tumors (clear cell type)(1), bone(1), alveolar rhabdomyosarcoma(2), breast(1), |
| | epithelium (cell line)(1), glioblastoma (pooled)(1), lung(1), lung tumor(1), parathyroid |
| | tumor(1), pectoral muscle (after mastectomy)(1), renal cell tumor(1) |
| 48901 | germinal center b cell(1), pooled germ cell tumors(1) |
| 49018 | anaplastic oligodendroglioma(1), brain(1), breast(1), frontal lobe (see description)(1), |
| | testis(5) |
| 49034 | adipose tissue, white(1), pancreas (with no medical abnormalities)(1) |
| 49133 | retina(1) |
| 49140 | 2 pooled tumors (clear cell type)(1), adenocarcinoma(1), carcinoid(6), colon tumor rer+(1), |
| | glioblastoma (pooled)(2), moderately differentiated adenocarcinoma(1), normal prostate(1), |
| | pancreatic islet(2), parathyroid tumor(3) |
| 49387 | colon(1), pooled germ cell tumors(1) |
| 49416 | anaplastic oligodendroglioma(1), carcinoid(3), cerebellum(2), frontal lobe(2), germinal center |
| | b cell(2), parathyroid tumor(1), retina(1), tumor(1) |
| 49493 | neuroepithelial cells(1), ovarian tumor(4), thyroid(1) |
| 49640 | 2 pooled tumors (clear cell type)(1), anaplastic oligodendroglioma(1), brain(2), colon tumor |
| | rer+(1), spleen(2) |
| 49863 | b-cell, chronic lymphotic leukemia(1), carcinoid(1), germinal center b cell(2), pooled germ |
| | cell tumors(3) |
| 49871 | b-cell, chronic lymphotic leukemia(1), carcinoid(1), germinal center b cell(2), pooled germ |
| | cell tumors(3) |
| 50185 | total brain(1) |
| 50763 | cerebral cortex(3), brain(2), colon(1), colon tumor rer+(1), ovarian tumor(1), schizophrenic |
| | brain s-11 frontal lobe(1) |
| 50982 | 2 pooled tumors (clear cell type)(2), b-cell, chronic lymphotic leukemia(3), carcinoid(1), |
| | cochlea(1), germinal center b cell(2) |
| 51130 | adenocarcinoma(1) |
| 51212 | placenta.(2) |
| 51346 | bone(1), small cell carcinoma(2) |
| 51380 | placenta(4) |
| 51400 | liver(1) |
| 51954 | germinal center b cell(1), total brain(1) |
| 52076 | normal prostatic epithelial cells(1) |

[1363] TABLE V

| SEQ ID NO. in | | |
|---|---|---|
| priority | | High |
| application | Low frequency expression | frequency expression |
| 37 | salivary gland | |
| 51 | fetal brain, fetal kidney | brain, salivary gland, |
| | | liver |
| 179 | liver | |
| 180 | liver | |
| 183 | prostate | |
| 326 | salivary gland | |
| 362 | testis | |
| 440 | brain | |
| 452 | placenta | |
| 483 | placenta | |
| 500 | salivary gland | |
| 528 | testis | |
| 573 | liver | |
| 587 | salivary gland | |
| 588 | liver | |
| 593 | fetal kidney, placenta | |
| 599 | liver | |
| 628 | testis | |
| 653 | testis | |
| 670 | testis | |
| 693 | placenta | |
| 703 | liver | |
| 746 | brain | |
| 770 | placenta | |
| 775 | testis | |
| 812 | brain | |
| 940 | liver | |
| 988 | liver | |
| 996 | testis | |
| 1036 | salivary gland, brain | |
| 1064 | brain, liver, prostate | fetal brain |
| 1151 | brain | |
| 1190 | salivary gland, prostate | |
| 1458 | stomach/intestine | |
| 1904 | prostate | |
| 2028 | brain | |
| 2368 | testis | |
| 2553 | prostate | |
| 2556 | prostate | |
| 2690 | testis | |
| 2755 | prostate | |
| 2800 | liver, testis | |
| 2843 | brain | |
| 2932 | fetal liver | |
| 3078 | prostate | |
| 3280 | liver | |
| 3326 | prostate | |
| 3387 | prostate | |
| 3439 | salivary gland | |
| 3501 | brain | |
| 3633 | brain | |
| 3678 | testis | |
| 3714 | liver | |
| 3801 | testis | |
| 3804 | salivary gland, fetal kidney | |
| 3892 | brain | |
| 3985 | stomach/intestine | |
| 4005 | liver | |
| 4063 | fetal brain | |
| 4088 | testis | |
| 4111 | brain | |
| 4126 | liver | |
| 4172 | liver | |
| 4261 | prostate | |
| 4436 | liver | |
| 4609 | fetal liver | |
| 4647 | fetal liver | |
| 4660 | fetal liver | |
| 4664 | fetal brain | |
| 4678 | fetal liver | |
| 4687 | fetal liver | |
| 4690 | fetal liver | |
| 4694 | salivary gland | |
| 4696 | salivary gland | |
| 4733 | fetal liver | |
| 4807 | fetal brain | |
| 4809 | salivary gland | |
| 4855 | prostate | |
| 4908 | brain | |
| 4943 | liver | |
| 4947 | testis | |
| 4976 | stomach/intestine | |
| 5000 | fetal kidney | |
| 5005 | fetal kidney | |
| 5011 | prostate | |
| 5040 | fetal liver | |
| 5089 | salivary gland | |
| 5117 | prostate | |
| 5141 | liver | |
| 5162 | fetal brain | |
| 5167 | salivary gland | |
| 5192 | liver | |
| 5214 | fetal brain | |
| 5250 | fetal kidney, fetal brain | |
| 5262 | brain | fetal kidney, fetal |
| | | brain |
| 5270 | fetal brain | |
| 5278 | fetal liver | |
| 5453 | fetal kidney | |
| 5494 | fetal liver | |
| 5499 | brain | |
| 5533 | fetal brain | |
| 5563 | fetal liver | |
| 5609 | placenta | |
| 5748 | placenta | |
| 5816 | fetal brain | |
| 5824 | prostate | |
| 5861 | fetal liver, prostate, fetal kidney, | |
| | salivary gland | |
| 5947 | fetal liver | |
| 5966 | placenta | |
| 5970 | fetal kidney | |
| 5974 | fetal liver | |
| 5983 | brain | |
| 5985 | fetal kidney | |
| 6080 | salivary gland | |
| 6081 | salivary gland | |
| 6108 | liver | |
| 6238 | placenta, brain | |
| 6252 | placenta | |
| 6334 | liver | |
| 6345 | brain | |
| 6358 | fetal brain | |
| 6636 | fetal brain | |
| 6688 | fetal brain | |
| 6727 | testis | |
| 6865 | salivary gland | |
| 6892 | stomach/intestine, fetal brain | |
| 7041 | liver | |
| 7533 | placenta | |
| 7535 | brain | |
| 7697 | fetal liver | |
| 7712 | testis | |
| 8078 | testis | |
| 8097 | salivary gland | |
| 8166 | placenta, fetal liver | |
| 8262 | prostate | |
| 8534 | testis | |
| 8666 | placenta | |
| 8744 | prostate | |
| 8968 | brain | |
| 8994 | testis | |
| 9297 | fetal liver | |
| 9332 | testis | |
| 9406 | prostate | |
| 9407 | prostate | |
| 9668 | testis | |
| 9755 | testis | |
| 9868 | liver | |
| 10044 | fetal liver, placenta | |
| 10526 | prostate | |
| 10650 | testis | |
| 10743 | stomach/intestine | |
| 10744 | salivary gland | |
| 10761 | prostate | |
| 10880 | fetal liver | |
| 10942 | brain | |
| 11019 | liver | |
| 11278 | salivary gland | |
| 11562 | testis | |
| 11688 | testis | |
| 11735 | fetal brain | |
| 11813 | brain | |
| 12043 | brain | |
| 12202 | testis | |
| 12220 | fetal kidney | |
| 12243 | brain, testis, liver | fetal brain, fetal liver |
| 12263 | prostate | |
| 12276 | brain | |
| 12604 | fetal kidney | |
| 12657 | fetal kidney, stomach/intestine | |
| 12788 | testis | |
| 12901 | placenta | |
| 12907 | salivary gland | |
| 13013 | fetal liver | |
| 13229 | brain | |
| 13256 | testis | |
| 13267 | salivary gland | |
| 13285 | fetal brain | fetal kidney, |
| | | stomach/intestine |
| 26638 | fetal liver | |
| 26710 | brain | |
| 26726 | fetal kidney | |
| 26786 | brain | |
| 27084 | testis | |
| 27273 | fetal kidney | |
| 27361 | liver | |
| 27374 | fetal liver | |
| 27877 | salivary gland | |
| 28413 | prostate | |
| 28517 | testis | |
| 28518 | placenta | |
| 29120 | salivary gland | |
| 29673 | fetal liver | |
| 30218 | liver | |
| 30446 | prostate | |
| 30477 | placenta | |
| 30583 | testis | |
| 30719 | fetal brain, salivary gland | |
| 31356 | prostate | |
| 31790 | brain | |
| 33130 | testis | |
| 38749 | prostate | |
| 38890 | placenta | |
| 40163 | testis | |
| 40975 | prostate | |
| 40991 | prostate | |
| 42896 | prostate | |
| 44053 | stomach/intestine, fetal kidney | |
| 45091 | stomach/intestine | |
| 45179 | prostate | |
| 45274 | fetal kidney | |
| 46679 | fetal liver | |
| 48024 | fetal kidney | |
| 48603 | liver, testis | |
| 48671 | testis | |
| 48823 | fetal kidney | |
| 48901 | salivary gland | |
| 49018 | stomach/intestine | |
| 49034 | salivary gland | |
| 49133 | liver | |
| 49261 | testis | |
| 49387 | liver | |
| 49416 | fetal brain | |
| 49426 | stomach/intestine | |
| 49493 | salivary gland | |
| 49640 | brain | |
| 49863 | brain | |
| 49871 | brain | |
| 50015 | testis | |
| 50049 | testis | |
| 50112 | testis | |
| 50185 | salivary gland | |
| 50241 | liver | |
| 50763 | brain | |
| 51130 | testis | |
| 51212 | stomach/intestine | |
| 51400 | liver | |

The application's sequence listing, which the Patent Office published only in electronic form, follows.

SEQUENCE LISTING (918 sequences)

SEQ ID NO: 1 - DNA, 615 bp, Homo sapiens
  CDS 88..471
  sig_peptide 88..189: Von Heijne matrix score 13.1278588169685 seq VLLLLSLLLTAXA/SS
  polyA_site 600..615
  polyA_signal 577..582
  Unsure 208..210: Xaa = Ile or Thr
acttatctgcagacttgtaggcagcaactcaccctcactcagaggtcttctggttctggaaacaactctagctcagccttctccaccatgagcctcagacttgataccaccccttcctgtaacagtgcgagaccacttcatgccttgcaggtgctgctgcttctgtcattgctgctgactgctytggcttcctccaccaaaggacaaaytaagagaaacttggcgaaaggcaaagacgaaagtctagacagtgacttgtatgctgaactccgctgcatgtgtataaagacaacctctggaattcatcccaaaaacatccaaagtttggaagtgatcgggaaaggaacccattgcaaccaagtcgaagtgatagccacactgaaggatgggaggaaaatctgcctggacccagatgctcccagaatcaagaaaattgtacagaaaaaattggcaggtgatgaatctgctgattaatttgttctgtttctgccaaacttctttaactcccaggaagggtagaattttgaaaccttgattttctagttctcatttattcaggatacctattcttactgtattaaaatttggatatgtgtttcaaaaaaaaaaaaaaaa

SEQ ID NO: 2 - DNA, 539 bp, Homo sapiens
  CDS 39..518
  sig_peptide 39..92: Von Heijne matrix score 12.2866240999866 seq LTLAVLFLTGSQA/RH
  polyA_site 524..539
  polyA_signal 507..512
agagactgcgagaaggaggtcccccacggcccttcaggatgaaagctgcggtgctgaccttggccgtgctcttcctgacggggagccaggctcggcatttctggcagcaagatgaacccccccagagcccctgggatcgagtgaaggacctggccactgtgtacgtggatgtgctcaaagacagcggcagagactatgtgtcccagtttgaaggctccgccttgggaaaacagctaaacctaaagctccttgacaactgggacagcgtgacctccgccttcagcaatctgcgcgaacagctcggccctgtgacccaggagttytgggataacctggaaaaggagacagagggcctgaggcaggagatgagcaaggatctggaggaggtgaaggccaaggtgcagccctacctggacgacttccagaagaagtggcaggaggagatggagctctaccgccagaaggcagctttcttaactatcctaacaagccttggaccaaatggaaataaagctttttgatgaaaaaaaaaaaaaaaa

SEQ ID NO: 3 - DNA, 796 bp, Homo sapiens
  CDS 134..373
  sig_peptide 134..211: Von Heijne matrix score 12.0462155590967 seq LLLALLLPTQIYS/SE
  Unsure 365..367: Xaa = Leu or Pro
atttgtggctttcctggtatataaggtctcgccggctcgccgcgctccccaccttgcctgcgcccgcccggagccagcggttctccaagcacccagcatcctgctagacgcgccgcgcaccgacggaggggacatgggcagagcaatggtggccaggctcgggctggggctgctgctgctggcactgctcctacccacgcagatttattccagtgaaactacaactggaacttcaagtaactcctcccagagtacttccaactctgggttggccccaaatccaactaatgccaccaccaaggtggctggtggtgccctgcagtcaacagccagtctcttcgtggtctcactctctcttctgcaycyctactcttaagagactcaggccaagaaacgtyttctaaatttccccatcttctaaacccaatccaaatggcgtctggaagtccaatgtggcaaggaaaaacaggtcttcatcgaatctactaattccacaccttttattgacacagaaaatgttgagaatcccaaatttgattgatttgaagaacatgtgagaggtttgactagatgatggatgccaatattaaatctgctggagtttcatgtacaagatgaaggagaggcaacatccaaaatagttaagacatgatttccttgaatgtggcttgagaaatatggacacttaatactaccttgaaaataagaatagaaataaaggatgggattgtggaatggagattcagttttcatttggttcattaattctataaggccataaaacaggtaatataaa

SEQ ID NO: 4 - DNA, 528 bp, Homo sapiens
  CDS 75..377
  sig_peptide 75..155: Von Heijne matrix score 11.8486806626293 LFLGLLLLPLVVA/FA
  polyA_site 513..528
  polyA_signal 498..503
attggccacagagacccagcccgagtttcccatcgcactgagcactgagatcctgctggaagctctgccgcagcatgagctccgcagccgggttctgcgcctcacgccccgggctgctgttcctggggttgctgctcctgccacttgtggtcgccttcgccagcgctgaagctgaagaagatggggacctgcagtgcctgtgtgtgaagaccacctcccaggtccgtcccaggcacatcaccagcctggaggtgatcaaggccggaccccactgccccactgcccaactgatagccacgctgaagaatggaaggaaaatttgcttggacctgcaagccccgctgtacaagaaaataattaagaaacttttggagagttagctactagctgcctacgtgtgtgcatttgctatatagcatacttcttttttccagtttcaatctaactgtgaaagaacttctgatatttgtgttatccttatgattttaaataaacaaaataaatcaagttgcaaaaaaaaaaaaaaaa

SEQ ID NO: 5 - DNA, 522 bp, Homo sapiens
  CDS 76..378
  sig_peptide 76..156: Von Heijne matrix score 11.8486806626293 LFLGLLLLPLVVA/FA
  polyA_site 508..522
  polyA_signal 499..504
aattggccacagagacccagcccgagtttcccatcgcactgagcactgagatcctgctggaagctctgccgcagcatgagctccgcagccgggttctgcgcctcacgccccgggctgctgttcctggggttgctgctcctgccacttgtggtcgccttcgccagcgctgaagctgaagaagatggggacctgcagtgcctgtgtgtgaagaccacctcccaggtccgtcccaggcacatcaccagcctggaggtgatcaaggccggaccccactgccccactgcccaactgatagccacgctgaagaatggaaggaaaatttgcttggacctgcaagccccgctgtacaagaaaataattaagaaacttttggagagttagctactagctgcctacgtgtgtgcatttgctatatagcatacttcttttttccagtttcaatctaactgtgaaagaacttctgatatttgtgttatccttatgattttaaataaacaaaataaatctaaaaaaaaaaaaaaa

SEQ ID NO: 6 - DNA, 652 bp, Homo sapiens
  CDS 75..332
  sig_peptide 75..128: Von Heijne matrix score 11.7816699306029 seq VLLLLLLVEQAAA/LG
  polyA_site 637..652
  polyA_signal 616..621
gactctttggtcagggaactgctcgctgagcacagctgcacagtgctgtcagaacggccgatctccagcccaagatgattccagcagtggtcttgctcttactccttttggttgaacaagcagcggccctgggagagcctcagctctgctatatcctggatgccatcctgtttctgtatggaattgtcctcaccctcctctactgtcgactgaagatccaagtgcgaaaggcagctataaccagctatgagaaatcagatggtgtttacacgggcctgagcaccaggaaccaggagacttacgagactctgaagcatgagaaaccaccmcagtagccttagaatagatgcggtcatattcttctttggcttctggttcttccagccctcatgtttggcatcacatatgcctgcatgccattaacaccagctggccctacccctataatgatcctgtgtcctaaattaatatacaccagtggttcctcctccctgttaaagactaatgctcagatgctgtttacggatatttatattctagtctcactctcttgtcccacccttcttctcttccccattcccaactccagctaaaatatgggaagggagaacccccaataaaactgccatggactggaaaaaaaaaaaaaaaa

SEQ ID NO: 7 - DNA, 743 bp, Homo sapiens
  CDS 112..387
  sig_peptide 112..183: Von Heijne matrix score 11.7298925418815 seq FVLGLGLTPPTLA/QD
  polyA_site 728..743
  polyA_signal 705..710
  Unsure 337..339: Xaa = Arg or Thr
acacaactggaacccatctccaggaacaaacagctggaacccatctcccgttgaagggaaactgccagatttttgtaagattcttcctcctgggagcctgtgttggaagagatggtgatgggcctgggcgttttgttgttggtcttcgtgctgggtctgggtctgaccccaccgaccctggctcaggataactccaggtacacacacttcctgacccagcactatgatgccaaaccacagggccgggatgacagatactgtgaaagcatcatgaggagacggggcctgacctcaccctgcaaagacatcaacacatttattcatggcaacaagcgcasatcaaggccatctgtgaaaacaagaatggaaaccctcacagagaaaacctaagaataagcaagtcttctttccaggtcaccacttgcaagctacatggaggttccccctggcctccatgccagtaccgagccacagcggggttcagaaacgttgttgttgcttgtgaaaatggcttacctgtccacttggatcagtcaattttccgtcgtccgtaaccagcgggcccctggtcaagtgctggctctgctgtccttgccttccatttcccctctgcacccagaacagtggtggcaacattcattgccaagggcccaaagaaagagctacctggaccttttgttttctgtttgacaacatgtttaataaataaaaatgtcttgatatcagcaaaaaaaaaaaaaaaa

SEQ ID NO: 8 - DNA, 502 bp, Homo sapiens
  CDS 39..371
  sig_peptide 39..86: Von Heijne matrix score 11.56948973398 seq ILLSVALLAFSSA/QD
  polyA_site 487..502
  polyA_signal 467..472
agcataaagttgggagtgacaccagagccttctgcaagatgcttctgattctgctgtcagtggccctgctggccttcagctcagctcaggacttagatgaagatgtcagccaagaagacgttcccttggtaatatcagatggaggagactctgagcagttcatagatgaggagcgtcagggaccacctttgggaggacagcaatctcaaccctctgctggtgatgggaaccagaatgatggccctcagcagggaccaccccaacaaggaggccagcagcaacaaggtccaccacctcctcagggaaagccacaaggaccacctccccaagggggccgcccacaaggacctccacaggggcagtctcctcagtaatctaggattcaatgacaggaagtgaataagaagatgacagtgtttcaaatgccttgaaacataatgtgatcatgctctaacttcaatataccaataaaataatcagcttgctaaaaaaaaaaaaaaaa

SEQ ID NO: 9 - DNA, 401 bp, Homo sapiens
  CDS 36..353
  sig_peptide 36..83: Von Heijne matrix score 11.56948973398 seq ILLSVALLAFSSA/QD
  polyA_site 386..401
ataaagttgggagtgacaccagagccttctgcaagatgcttctgattctgctgtcagtggccctgctggccttcagctcagctcaggacttagatgaagatgtcagccaagaagacgttcccttggtaatatcagatggaggagactctgagcagttcatagatgaggagcgtcagggaccacctttgggaggacagcaatctcaaccctctgctggtgatgggaaccaggatgatggccctcagcagggaccaccccaacaaggaggccagcagcaacaaggtccaccacctcctcagggaaagccacaaggaccaccccaacagggaggccagtcttgttgctgtgacaagtaacagccttttttttaaattgttttttatacaaaaaaaaaaaaaaaa

SEQ ID NO: 10 - DNA, 961 bp, Homo sapiens
  CDS 45..467
  sig_peptide 45..116: Von Heijne matrix score 10.983328612314 seq LAGLCCLVPVSLA/ED
  polyA_site 946..961
  polyA_signal 927..932
ctcagcttcaggcaccaccactgacctgggacagtgaatcgacaatgccgtcttctgtctcgtggggcatcctcctgctggcaggcctgtgctgcctggtccctgtctccctggctgaggatccccagggagatgctgcccagaagacagatacatcccaccatgatcaggatcacccaaccttcaacaagatcacccccaacctggctgagttcgccttcagcctataccgccagctggcacaccagtccaacagcaccaatatcttcttctccccagtgagcatcgctacagcctttgcaatgctctccctggggaccaaggctgacactcacgatgaaatcctggagggcctgaatttcaacctcacggagattccggaggctcagatccatgaaggcttccaggaactcctccgtaccctcaaccagccagacagccagctccagctgaccaccggcaagaattaatgctttcttaactaagttactttgagtattaacaagtagcttatactgaggtgtgcttcaagggagcattatagggcagaaaacaaattaaaatgaaatgttgttgttatagccatgcattgaccattaaatgcattttaatatctcggcaaaatgagatttgaaactcattagtttaactcttaaaacatagtgttgttaaacagtattttttgggggcgggtggatagctttttsttctatcttgtacagaaaacagtaatggaatcactcatgttcagaaccttgtaaatatgtctgtaatattaatgcttccctttattaacacaaatatacattcaaaaagggagattttatttagacacacattttcttttcaccctaatctatttagattcatacttattgagacgggaaaaactcgctgtaaaataatgccaacctagataatgctataataaattattttgtacacaaaaaaaaaaaaaaaa

SEQ ID NO: 11 - DNA, 643 bp, Homo sapiens
  CDS 91..462
  sig_peptide 91..180: Von Heijne matrix score 9.99993961154359 seq LLFGFTLVSGTGA/EK
  polyA_site 628..643
  polyA_signal 607..612
acccctaccccacgccccctcccgcgcgcgcggttaaatccccgcacctgagcatcggctcacacctgcaccccgcccgggcatagcaccatgcctgcttgtcgcctaggcccgctagccgccgccctcctcctcagcctgctgctgttcggcttcaccctagtctcaggcacaggagcagagaagactggcgtgtgccccgagctccaggctgaccagaactgcacgcaagagtgcgtctcggacagcgaatgcgccgacaacctcaagtgctgcagcgcgggctgtgccaccttctgctctctgcccaatgataaggagggttcctgcccccaggtgaacattaactttccccagctcggcctctgtcgggaccagtgccaggtggacagccagtgtcctggccagatgaaatgctgccgcaatggctgtgggaaggtgtcctgtgtcactcccaatttctgagctccagccaccaccaggctgagcagtgaggagagaaagtttctgcctggccctgcatctggttccagcccacctgccctcccctttttcgggactctgtattccctcttgggctgaccacagcttctccctttcccaaccaataaagtaaccactttcagcaaaaaaaaaaaaaaaa

SEQ ID NO: 12 - DNA, 577 bp, Homo sapiens
  CDS 28..399
  sig_peptide 28..117: Von Heijne matrix score 9.99993961154359 seq LLFGFTLVSGTGA/EK
  polyA_site 562..577
  polyA_signal 540..545
acctgcaccccgcccgggcatagcaccatgcctgcttgtcgcctaggcccgctagccgccgccctcctcctcagcctgctgctgttcggcttcaccctagtctcaggcacaggagcagagaagactggcgtgtgccccgagctccaggctgaccagaactgcacgcaagagtgcgtctcggacagcgaatgcgccgacaacatcaagtgctgcagcgcgggctgtgccaccttctgctctctgcccaatgataaggagggttcctgcccccaggtgaacattaactttccccagctcggcctctgtcgggaccagtgccaggtggacagccagtgtcctggccagatgaaatgctgccgcaatggctgtgggaaggtgtcctgtgtcactcccaatttctgagctccagccacaggctgagcagtgaggagagaaagtttctgcctggccctgcatctggttccagcccacctgccctcccctttttcgggactctgtattccctcttgggctgaccacagcttctccctttcccaaccaataaagtaaccactttcagctaaaaaaaaaaaaaaaa

SEQ ID NO: 13 - DNA, 785 bp, Homo sapiens
  CDS 10..216
  sig_peptide 10..60: Von Heijne matrix score 9.5148977432302 FVFLLFVISLAAA/AH
aacccacttatgtttcctggctttgtttttttgctctttgtaataagtcttgctgctgctgctcatctttgggtcctggccgcctttatgggccgtatcaccgtgaaggtctgcagcttcactcctgaggccagcaagaccgtgagcccaccagaaggagcgaacaactcgagacgcactgcttttaagagctgtaacactcaccacaaaggtctgtagcatcactcctgaagtcagcgggaccacgaacctaccagaaagaagaaactccatacagatctgaaaatctgaaggaacaaactccggacacaccatctttaagaactgtaacactcactgcgagggtccacggcttcatttttgaagtcagccagaccaagaacccaccaattccgcacacacttctgctgtttcgttccattctcaaggaaaaactgtgatgggtccatttttaatcacatgcaaattcatgggcaaatctttgctatggttatgtactttgatttagtagagttgtatcacatgttcactcatgtgcccacaatagcagggtataccaataggctgcttcaaaacaatcatgaaaagtaggaggtggtgtttccaaaggtagtggtcttgccagaaaaaaatggaaatactgtgaagataaaaataaacatctattaacacaaaaatagaaaaataatataggtacacatacacatacttttctacatattttttgcagtcatatcagaggaacaatacagaggaacaaaagtgtaaatcaaaaaaaaaaaaaa

SEQ ID NO: 14 - DNA, 1154 bp, Homo sapiens
  CDS 88..318
  sig_peptide 88..186: Von Heijne matrix score 9.33181480765342 seq MVLLSFALTLCSA/FW
  polyA_site 1139..1154
  Unsure 202..204: Xaa = Lys or Met
ctgtgggtgcccaggaagggactacacctcttcgcagtgttttatacctttggtaatatcgcatcaattgggagtaccatcttcctcatgggaccagtgaaacagctgaagcgaatgtttgagcctactcgtttgattgcaactatcatggtgctgttgagttttgcacttaccctgtgttctgccttttggtggcataacawgggacttgcacttatcttctgcattttgcagtctttggcattgacgtggtacagcctttccttcataccatttgcaagggatgctgtgaagaagtgttttgccgtgtgtcttgcataattcatggccagttttatgaagctttggaaggcactatggacagaagctggtggacagttttgtaactatcttcgaaacctctgtcttacagacatgtgccttttatcttgcagcaatgtgttgcttgtgattcgaacatttgagggttacttttggaagcaacaatacattctcgaacctgaatgtcagtagcacaggatgagaagtgggttctgtatcttgtggagtggaatcttcctcatgtacctgtttcctctctggatgttgtcccactgaattcccatgaatacaaacctattcagcaacagcacataagccttgggtgcaagtgattcccaggtggcaaaaggcagccccatcagagatcacgggagcaacagtaagggacagagttttggggtccacttgtccctcagcatggaagccatcaccgtggtcctgcatagagtgagtctacttctactctggcatctgagaacaagtgactctgctttagacaagcccctggagagcctggccatggagtgaggtagaaaagaagcactttttggtggtatatgctgtttctgaatttgaatctaagcattcttggtgttctgattctgcgcctgactgtggaatgtattttctgacattaggtgcagactctttttctcttgggttttatttcccatccctccctccctctccctgcatatctttctttatgacctcctggcactagatggggaaagaacagagcagcagcagcagaaaatgctgctgttttttttggacgagagcccataggagttgaaaaatcctgctgctctcgtccaaaaaaaaaaaaaaaa

SEQ ID NO: 15 - DNA, 766 bp, Homo sapiens
  CDS 84..521
  sig_peptide 84..161: Von Heijne matrix score 8.99656184291183 seq GLLWAFCAPGARA/EE
  polyA_site 751..766
  polyA_signal 728..733
gaggaagagcgttttggggacgggggctggtgaggctcacgttggagggcttcgcgtctgcttcggagaccgtaaggatattgatgaccatgagatccctgctcagaacccccttcctgtgtggcctgctctgggccttttgtgccccaggcgccagggctgaggagcctgcagccagcttctcccaacccggcagcatgggcctggataagaacacagtgcacgaccaagagcatatcatggagcatctagaaggtgtcatcaacaaaccagaggcggagatgtcgccacaagaattgcagctccattacttcaaaatgcatgattatgatggcaataatttgcttgatggcttagaactctccacagccatcactcatgtccataaggaggaagggagtgaacaggcaccactaatgagtgaagatgaactgattaacataatagatggtgttttgagagatgatgacaagaacaatgatggatacattgactatgctgaatttgcaaaatcactgcagtagatgttatttggccatctcctggttatatacaaatgtgacccgtgataatgtgattgaacactttagtaatgcgaaataactcatttccaactactgctgcagcattttggtaaaaacctgtagcgattcgttacactggggtgagaagagataagagaaatgaaagagaagagaaatgggacatctaatagtccctaagtgstattaaataccttattggacaagcaaaaaaaaaaaaaaaa

SEQ ID NO: 16 - DNA, 808 bp, Homo sapiens
  CDS 155..340
  sig_peptide 155..292: Von Heijne matrix score 8.64329745298384 AVLLLILFAIVFG/LL
  polyA_site 754..808
  polyA_signal 728..733
cttttcctctcaacagttgcttctttgagtcagggtgcagctctggtcacctggcggcctcttcagctcagccctccacaaagtgtgagcctgaaggaccaccctgaattgcccttgtaggacccagaacagctaccagcagaatcagattctcatggaccaactggtattcaaagagacaatctggaatgatgcgttctggcagaacccctgggaccaggggggcctggcagtgattatcttattcatcaccgctgtcctgcttctcatcttatttgccatcgtgtttggtttactcacttccacagaaaacactcagtgtgaagcgggtgaagaggagtgacctgacttgctggggactgagatggcagcaggggaggcgagctgacctgcccccattccagtggtgggccccttcgcggttccctctggctcaggggccaagccctggtgtcttcctttcccaccaggaaaaagtctagtaaaatactgtatctggcttagggttggtcagactagtaagatggggaggctggtctgagaccaattctggctccttgaccctattgtttttagggttccccgaccagaaccctaaaagcacatggagaggatggctccactgcctcaggtggaaggagctatggctaacaaggttctctaacaggctcacaggcccagccagcaatttcacaaatccttgacagagaaagacacaaccaaatgaaataaaaattccttttcaaatctgctaaaaaaaaaaaaaaaaaaaaaaaaaaaaaaramaaaaaaaaaaaaaaaaaaaaaa

SEQ ID NO: 17 - DNA, 772 bp, Homo sapiens
  CDS 155..340
  sig_peptide 155..292: Von Heijne matrix score 8.64329745298384 AVLLLILFAIVFG/LL
  polyA_site 751..772
  polyA_signal 728..733
cttttcctctcaacagttgcttctttgagtcagggtgcagctctggtcacctggcggcctcttcagctcagccctccacaaagtgtgagcctgaaggaccaccctgaattgcccttgtaggacccagaacagcaaccagcagaatcagattctcatggaccaattggtattcaaagagacaatctggaatgatgcgttctggcagaacccctgggaccaggggggcctggcagtgattatcttattcatcaccgctgtcctgcttctcatcttatttgccatcgtgtttggtttactcacttccacagaaaacactcagtgtgaagcgggtgaagaggagtgacctgacttgctggggactgagatggcagcaggggaggcgagctgacctgcccccattccagtggtgggccccttcgcggttccctctggctcaggggccaagccctggtgtcttcctttcccaccaggaaaaagtctagtaaaatactgtatctggcttagggttggtcagactagtaagatggggaggctggtctgagaccaattctggctccttgaccctattgtttttagggttccccgaccagaaccctaaaagcacatggagaggatggctccactgcctcaggtggaaggagctatggctaacaaggttctctaacaggctcacaggcccagccagcaatttcacaaatccttgacagagaaagacacaaccaaatgaaataaaaattccttttcaaatctaaaaaaaaaaaaaaatgcgaaa

SEQ ID NO: 18 - DNA, 546 bp, Homo sapiens
  CDS 13..498
  sig_peptide 13..153: Von Heijne matrix score 4.65474235719409 seq LALSSLRSLLLFA/GM
  polyA_site 533..546
  polyA_signal 514..519
aagcgctgacgcatgcgcatagctaaccgcacccggttcagctcgcctttcttggccagaggcgccggttggactcacgggcggggcatgatggtggtgggtacgggcacctcgctggcgctctcctccctccggtccctgctgctctttgctgggatgcagatgtacagccgtcagctggcctccaccgagtggctcaccatccagggcggcctgcttggttcgggtctcttcgtgttctcgctcactgccttcaataatctggagaatcttgtctttggcaaaggattccaagcaaagatcttccctgagattctcctgtgcctcctgttggctctctttgcatctggcctcatccaccgagtctgtgtcaccacytgcttcatcttctccatggttggtctgtactacatcaacaagatctcctccaccctgtaccaggcagcagctccagtcctcacaccagccaaggtcacaggcaagagcaagaagagaaactgaccctgaatgttcaataaagttgattctttgcaaaaaaaaaaaaaa

SEQ ID NO: 19 - DNA, 767 bp, Homo sapiens
  CDS 132..401
  sig_peptide 132..236: Von Heijne matrix score 8.35677668307059 seq LGLGLVTLTASWA/AL
  polyA_site 752..767
  polyA_signal 741..746
ccttcagcgcccggccgagagcccggtggctgcgactgagagcctggttactgccggcacctttggatcctcggccaattctctgcttcgcctacacttggcgtgcggtgtaccagcctccccgcgtcaccatggaaacaggagcctctgcatccatcccagagctgatctgtgaagctatgagaagaatctggagcctgggattggggttggtgactctgacggccagctgggcagctcttttccacgatggctttgcggttcttggaggaaacattgtgagcgatctcagcacagtaagatttgttgcacaacagcagcacttccagctccttgacgtgtggaccaggaatttccggaagccactgggcagcatgtgctttgttttcttgttgctcccataatcaatgttgggcatcaagatctaacccttgaaccttccacgaaccctgttgtcaatacctctgggtttccgccggttacgcttaattttgacatatcggtcagactggtgccggataaacttcttggttctctttttgacgatcttgggcttcccaagggttctgaggacggtttataaaagtgcactgaggggaggctgagacaggagaattgcttgaacccgggaggcggaggttgcagtgagccgagatcgtgcccatcctaggcgacagagagagactctatgtcaaaaataaataaataaataaataaataaataaataaataaataaataaataaaatgccaaaaaaaaaaaaaaaa

SEQ ID NO: 20 - DNA, 596 bp, Homo sapiens
  CDS 41..478
  sig_peptide 41..115: Von Heijne matrix score 8.18796433724836 seq ATLLLVLCLQLGA/NK
  polyA_site 581..596
  polyA_signal 560..565
  Unsure 293..295: Xaa = Arg or Lys
accacttctctgggacacattgccttctgttttctccagcatgcgcttgctccagctcctgttcagggccagccctgccaccctgctcctggttctctgcctgcagttgggggccaacaaagctcaggacaacactcggaagatcataataaagaattttgacattcccaagtcagtacgtccaaatgacgaagtcactgcagtgcttgcagttcaaacagaattgaaagaatgcatggtggttaaaacttacctcattagcagcatccctctacaaggkgcmtttaactatargtatactgcctgcctatgtgacgacaatccaaaaaccttctactgggacttttacaccaacagaactgtgcaaattgcagccgtcgttgatgttattcgggaattaggcatctgccctgatgatgctgctgtaatccccatcaaaaacaaccggttttatactattgaaatcctaaaggtagaataatggaagccctgtctgtttgccacacccaggtgatttcctctaaagaaacttggctggaatttctgctgtggtctataaaataaacttcttaacatgctcaaaaaaaaaaaaaaaa

SEQ ID NO: 21 - DNA, 672 bp, Homo sapiens
  CDS 7..366
  sig_peptide 7..102: Von Heijne matrix score 7.64815044221151 VTLGIGFFALASA/LW
  polyA_site 641..672
agtcatatggcttcacctaaaggtttttttaattacttgacctattttcttgctgctggtgctgtcactttgggaattggtttctttgctttggcatcagctttgtggttcctgatttgcaaacgaagagaaatatttcaaaattccaaatttaaagcaattgatgagagatgcaggcaaagaccatcaatggcgaaaattaaatctcattctcagtgtgtttttatttctcgaaattttcatactgggagattccaattacagcaattaaagatcattctaaagatgaaccccaacttgcaacaaaaaatatcatttgtgatccctcagagaccagctccacaacaaatcgcagcagtgttacattaagcttatcaacattaccatctgattcttattacagccaaagtatagaagcagctgatgactggttttctgatgattctctagtgaaaaggaactctccaatgccttctctcggggaacctctaatggaaaaagtattttcatacctgtcaaccatttcattagaagagggtactgaaagtgtactgaatgacactttatgaccatcaaaaagatgactacattaagggaaaatgttcatgaagaaacacagaggttgaaatataaaaccttcaacagaaaaaaaaaaaaaaatgcgaaaagctt

SEQ ID NO: 22 - DNA, 438 bp, Homo sapiens
  CDS 84..317
  sig_peptide 84..140: Von Heijne matrix score 7.64030745849671 seq ALVLALMISMISA/DS
  polyA_site 421..438
  polyA_signal 397..402
atagaaaaggacatctcttgagacttcacttcagcttcactgacttcttgactctcctcttgagtaaaaggactcagccaactatgaagttttttgtctttgctttagtcttggctctcatgatttccatgattagcgctgattcacatgaaaagagacatcatgggtatagaagaaaattccatgaaaagcatcattcataccatatcacactactaccactttttgaagaatcatcaaagagcaatgcaaatgaaaaacactataatttactgtatactctttgtttcaggatacttgccttttcaattgtcacttgatgatataattgcaatttaaactgttaagctgtgttcagtactgtttctgaataatagaaatcacttctctaaaagcaataaatttcaagcacatttttaaataaaaaaaawawaaaaa

SEQ ID NO: 23 - DNA, 617 bp, Homo sapiens
  CDS 141..401
  sig_peptide 141..200: Von Heijne matrix score 7.42708462116258 LLVFLAGFPVLDA/ND
  polyA_site 603..617
gatttctcccggaacctctgctcagcctggtgaaccacacaggcccgagtttcacccagtccccactccacggtgcagctgcggcttatctctcagcccagcgagatgccagccttcctgtcccgggccagcgctctgacatgcagaaggtgaccctgggcctgcttgtgttcctggcaggctttcctgtcctggacgccaatgacctagaagataaaaacagtcctttctactatgactggcacagcctccaggttggcgggctcatctgcgctggggttctgtgcgccatgggcatcatcatcgtcatgagtgcaaaatgcaaatgcaagtttggccagaagtccggtcaccatccaggggagactccacctctcatcaccccaggctcagcccaaagctgatgaggacagaccagctgaaattgggtggaggaccgttctctgtccccaggtcctgtctctgcacagaaacttgaactccaggatggaattcttcctcctctgctgggactcctttgcatggcagggcctcatctcacctctcgcaagagggtctctttgttcaatttttttttatctaaaatgattgtgcctctgcccaaaaaaaaaaaaaaa

SEQ ID NO: 24 - DNA, 673 bp, Homo sapiens
  CDS 69..383
  sig_peptide 69..125: Von Heijne matrix score 7.20796835452081 VSIMLLLVTVSDC/AV
  Unsure 234..236: Xaa = Glu or *
acaaggctgagcgggaggaagcgagaggcatctaagcaggcagtgttttgccttcaccccaagtgaccatgagaggtgccacgcgagtctcaatcatgctcctcctagtaactgtgtctgactgtgctgtgatcacaggggcctgtgagcgagatgtccagtgtggggcaggcacctgctgtgccatcagcctgtggcttcgagggctgcggatgtgcaccccgctggggcggkaaggcgaggagtgccaccccggcagccacaagatccccttcttcaggaaacgcaagcaccacacctgtccttgcttgcccaacctgctgtgctccaggttcccggacggcaggtaccgctgctccatggacttgaagaacatcaatttttaggcgcttgcctggtctcaggatacccaccatccttttcctgagcacagcctggatttttatttctgccatgaaacccagctcccatgactctcccagtccctasactgactaccctgatctctcttgtctagtacgcacatatgcacacaggcagacatacctcccatcatgacatggtccccaggctggcctgaggatgtcacagcttgaggctgtggtgtgaaaggtggccagcctggttctcttccctgctcaggctgcactcaaaaaaaaaaawaaatgcgaaa

SEQ ID NO: 25 - DNA, 678 bp, Homo sapiens
  CDS 69..383
  sig_peptide 69..125: Von Heijne matrix score 7.20796835452081 VSIMLLLVTVSDC/AV
  polyA_site 652..678
acaaggctgagcgggaggaagcgagaggcatctaagcaggcagtgttttgccttcaccccaagtgaccatgagaggtgccacgcgagtctcaatcatgctcctcctagtaactgtgtctgactgtgctgtgatcacaggggcctgtgagcgagatgtccagtgtggggcaggcacctgctgtgccatcagcctgtggcttcgagggctgcggatgtgcaccccgctggggcgggaaggcgaggagtgccaccccggcagccacaagatccccttcttcaggaaacgcaagcaccacacctgtccttgcttgcccaacctgctgtgctccaggttcccggacggcaggtaccgctgctccatggacttgaagaacatcaatttttaggcgcttgcctggtctcaggatacccaccatccttttcctgagcacagcctggatttttatttctgccatgaaacccagctcccatgactctcccagtccctacactgactaccctgatctctcttgtctagtacgcacatatgcacacaggcagacatacctcccatcatgacatggtccccaggctggcctgaggatgtcacagcttgaggctgtggtgtgaaaggtggccagcctggttctcttccctgctcaggctgcactcaaaaaaaaaaaaaaatgcgaaaagctt

SEQ ID NO: 26 - DNA, 860 bp, Homo sapiens
  CDS 129..434
  sig_peptide 129..236: Von Heijne matrix score 7.04760006506154 seq PFFLITLVGVVVA/VV
  polyA_site 845..860
  polyA_signal 826..831
  Unsure 297..299: Xaa = Ile or Met
  Unsure 390..392: Xaa = Ile or Ser
tccggggcccgggagccaaccgagggcgttcctgtcggggctgcagcggcgggagggagcccagtggaggcgccctcccgaagcgccactgcccatgctgaccacccagccctccggctgctgatgtcatgagtaacaccactgtgcccaatgccccccaggccaacagcgactccatggtgggctatgtgttggggcccttcttcctcatcaccctggtcggggtggtggtggctgtggtaatgtatgtacagaagaaaaagcgggtggaccggctgcgccatcacctgctccccatktacagctatgacccagctgaggaactgcatgaggctgagcarcagctgctctctgacatgggagaccccaaggtggtacatggctggcagaktggctaccagcacaagcggatgccactgctggatgtcaagacgtgacctgacccccttgccccacccttcagagcctggggtcctggactgcctggggccctgccatctgcttcccctgctgtcacctggctccccctgctgggtgctgggtctccatttctccctccacccaccctcagcagcatctgcttcccatgccctcaccatcacctcactgcccccaggccttctgccctttgtgggtgttgagctcaccgcccacccacaggcactcataggaagaggctttccttctgggatggcggcggctggtagacacctttgctttctctagccctcctgggctgggcttgggcacaaatccccaggcaggctttggagttgtttccatggtgatggggccagatgtatagtattcagtatatattttgtaaataaaatgttttgtggctaaaaaaaaaaaaaaaa

SEQ ID NO: 27 - DNA, 1443 bp, Homo sapiens
  CDS 30..440
  sig_peptide 30..83: Von Heijne matrix score 7.06387130837154 seq VLGLVLLSVTVQG/KV
  polyA_site 1428..1443
  polyA_signal 1409..1414
cagcctagcactctgacctagcagtcaacatgaaggctctcattgttctggggcttgtcctcctttctgttacggtccagggcaaggtctttgaaaggtgtgagttggccagaactctgaaaagattgggaatggatggctacaggggaatcagcctagcaaactggatgtgtttggccaaatgggagagtggttacaacacacgagctacaaactacaatgctggagacagaagcactgattatgggatatttcagatcaatagccgctactggtgtaatgatggcaaaaccccaggagcagttaatgcctgtcatttatcctgcagtgggtggcatggagaaatcgttgtcaaaacagagatgtccgtcagtatgttcaaggttgtggagtgtaactccagaattttccttcttcagctcattttgtctctctcacattaagggagtaggaattaagtgaaaggtcacactaccattattttccccttcaaacaaataatatttttacagaagcaggagcaaaatatggcctttcttctaagagatataatgttcactaatgtggttattttatattaagcctacaacatttttcagtttgcaaatagaactaatactggtgaaaatttacctaaaaccttggttatcaaatacatctccagtacattccgttcttttttttttttttttttttttttttgagacagtctcgctctgtcgcccaggctggagtgcagtggcgcaatctcggctcactgcaacctccacctcccgggttcacgccattctcctgcctcagcctcccgagtagctgggattacgggcgcccgccaccacgcccggctaattttttgtatttttagtagagacagggtttcaccgttttagccaggatggtctcgatctcctgaccttgtgatccacccacctcggcctcccaaagtgctgcgattacaggcgtgagccactgcgcccggccacattcagttyttatcaaagaaataacccagacttaatcttgaatgatacgattatgcccaatattaagtaaaaaatataagaaaaggtkatcttaaatagatcttaggcaaaataccagctgatgaaggcatctgatgccttcatctgttcagtcatctccaaaaacagtaaaaataaccactttttgttgggcaatatgaaatttttaaaggagtagaataccaaatgatagaaacagactgcctgaattgagaattttgattttttaaagtgtgtttctttctaaattgctgttccttaatttgattaatttaattcatgtattatgattaaatctgakgcakatgagcttacaagtattgaaataattactaattaatcacaaatgtgaagttatgcatgatgtaaaaaatacaaacattctaattaaaggctttgcaacacaaaaaaaaaaaaaaaa

SEQ ID NO: 28 - DNA, 622 bp, Homo sapiens
  CDS 82..384
  sig_peptide 82..168: Von Heijne matrix score 6.9066614461057 seq VCMCVFSTQGALG/EM
  polyA_site 607..622
  polyA_signal 570..575
gctacctcctggtgtctgttgcctggtgtgtgggaaacccccacacgctggaccacagaagtcttctgtgttgactgttgaatgagggaagagaaaaagccctttgagagagagagagagagtgtgtgtgtgtgtatgtgtgtgttttccactcaaggagctttgggggaaatggctgcacacttcatagatgaaaagctgaggcccagtgaggggaatggtcacagagggacactggatagcctgagttcggaccaagagtcctacatcccctccaccgccgaccccacccaggctggccctgagctgctgcacaagaacttgcccgtgacctcccgatcccagccgctgccctctgacctcgcgatcccagccgctgccctctgacctcccgatcccagccgctgccctcgctgagcttggaccacgtgcctgagacccgtctttcctcatttaaaccctgctcggggtggggggagctccacaccggcggggaacgtgcttgttcacagtgtgttcttagcctctagaacagagcctcaggcacaggaggcacttcacatttattgaataaatagatgaatgaatcagtgtcatcctcccaacaaaaaaaaaaaaaaaa

SEQ ID NO: 29 - DNA, 658 bp, Homo sapiens
  CDS 114..497
  sig_peptide 114..191: Von Heijne matrix score 6.8337397741578 seq VFLSLFLIQLLIS/FS
  Unsure 336..338: Xaa = Glu or Lys
ctcagcacccagggcggtggtaggtcacagtctctgggcgggtctcagtgtccaacactgtagctggtgcctgccaggttcccagtggctggggtcaccaggtctgaagagagatgtgctggctgcgggcatggggccagatcctcctgccagttttcctctccctctttctcatccaattgcttatcagcttctcagagaatggttttatccacagccccaggaacaatcagaaaccaagagatgggaatgaagaggaatgtgctgtaaagaagagttgtcaattgtgcacagaagataagaaatgtgtttggtgtagtgaagaaaaagcatgcraaaaatactgttttccctatttcggttgtcgattcagttctatatattggttaaactgtaaagttgacatgtttggaatcatgatgcttctactcattgcagtattaattacaggattcgtttggtactgctgcgcctatcacttttacctgcaggatatatgatgaatagataattgaaaagagatcctccagaaagagcagaaggaagtttcttcaatggcttccttcaggattttaatcatccttacagcctctttgagaatgattgaacttccaaattccctgaagttaaaattttaaattctattaaacattttttc

SEQ ID NO: 30 - DNA, 619 bp, Homo sapiens
  CDS 74..499
  sig_peptide 74..145: Von Heijne matrix score 6.56258453552342 seq LSICLSAVATATG/AE
  polyA_site 556..619
  Unsure 380..382: Xaa = Asn or Lys
  Unsure 383..385: Xaa = Arg, Leu, or Trp
  Unsure 413..415: Xaa = Asp or Glu
agcgactaggacgcgcctgcgcagaggcggcagcaccaccggggttgactccgggggcgcggcgaggagagacatgaggctgagctggttccgggtcctgacagtactgtccatctgcctgagcgccgtggccacggccacgggggccgagggcaaaaggaagctgcagatcggggtcaagaagcgggtggaccactgtcccatcaaatcgcgcaaaggggatgtcctgcacatgcactacacgggtaagctggaagatgggacagagtttgacagcagcctgccccagaaccagccctttgtcttctcccttggcacaggccaggtcatcaagggctgggaccaggggctgctggggatgtgtgagggggaaaagcgcaasykggtgatcccatccgagctagggtatggagascggggagctcccccaaagattccaggcggtgcaaccctggtgttcgargtggagctgctcaaaatagagcgacgaactgagctgtaaccagactggggaggggcagggggagaggcccccatcagggaccagactgttccaaaaaaaaaacaaaaaacaaaaacaaacaaaaaaacacttaaaagccgaaaaaaaaaaaaaaaa

SEQ ID NO: 31 - DNA, 573 bp, Homo sapiens
  CDS 65..274
  sig_peptide 65..136: Von Heijne matrix score 6.54728084640774 ILLTRPACLGSWA/EI
  polyA_site 556..573
  polyA_signal 540..545
cactgattctttggccatcgctactacaattttagaattgctggcaattttttctgcacactggatggcttcttccaccagtgtctcaacaggacaaatcttgctgacaagacctgcttgcttggggtcctgggctgagatccggtcaccggtgaggaccatctccatcgccagcgacttcccaacagcacgggtgagtctctgggtgccgcccgcacctgggatggttcctattaagatctccggctgtgcaaactgggccttctcaccggcatagatgatatcacacatcatggcaagctcacagcccccgccaaaggcatagccattgacagcagcgatgactggattcttgacctgggtgaggtggtcccagtgcttcaagaacttgctggagtaacagtcctggaaactcaggttctgcatttccttgatatcagctctagtgaaaagggcggtagttggtggtggaaccagaaacggacgccggtgcttggagcggttcttaaattatatttaaaaaagtaactttttgtataaataaaagaaaatgggacaaaaaaaaaaaaaaaa

SEQ ID NO: 32 - DNA, 497 bp, Homo sapiens
  CDS 51..389
  sig_peptide 51..119: Von Heijne matrix score 6.43297166361141 seq LGALSGAAALGFA/SY
  polyA_site 482..497
  polyA_signal 462..467
  Unsure 141..143: Xaa = Asn, Gln, His, or Lys
ctcttgggtggcctgggcggcgttggtccggtgcgtcctgttctacagctatggccgggccagctgcagctttccgccgcttgggcgccttgtccggagctgcggccttaggcttcgcttcctacggggcgcacggcgccmawttcccagatgcctacgggaaggagctgtttgacaaggccaacaaacaccacttcttacacagcctggccctgttaggggtgccccattgcagaaagccactctgggctgggttattgctagcttccggaacgaccttattctgcaccagcttttactaccaggctctgagtggagaccccagcatccagactttggcccctgcgggagggaccctgctactcttgggctggcttgccttggctctttgagctcccttttgcttaattactgggttttctgcgcagtttttttttttaaagagttggagtaagaagaggattaaaaaggaaaggcaaacaaaaaaaaaaaaaaaa

SEQ ID NO: 33 - DNA, 484 bp, Homo sapiens
  CDS 14..352
  sig_peptide 14..82: Von Heijne matrix score 6.43297166361141 seq LGALSGAAALGFA/SY
  polyA_site 469..484
  polyA_signal 443..448
  Unsure 104..106: Xaa = Gln or Lys
ctgttctacagctatggccgggccagctgcagctttccgccgcttgggcgccttgtccggagctgcggccttaggcttcgcttcctacggggcgcacggcgccmaattcccagatgcctacgggaaggagctgtttgacaaggccaacaaacaccacttyttacacagcctggccctgttaggggtgccccattgcagaaagccactctgggctgggttattgctagcttccggaacgaccttattytgcaccagcttttactaccaggctytgagtggagaccccagcatccagactttggcccctgcgggagggaccctgctactcttgggctggcttgccttggctctttgagctcccttttgattaattactgggttttctgggcagttttttttttttaaagagttggagtaagaagaggattaaaaaggaaaggcaaataaactttggagtctttgttcatcaaaaaaaaaaaaaaaa

SEQ ID NO: 34 - DNA, 739 bp, Homo sapiens
  CDS 111..272
  sig_peptide 111..161: Von Heijne matrix score 6.48133858229514 LTFAQLLFATVLG/IA
  polyA_site 718..739
  polyA_signal 688..693
aattgtagacgtcagtgttggtgttaacatttcagatttgaagagatttcctgggtgtggagtgtgactttccaaaaccagcttttccttgagctgtatttgttgcagcaatgtttaggagattgacttttgcacaactgctttttgccactgtccttggaattgctggaggagtatatatttttcaaccagtatttgaacagtatgccaaagatcagaaggaattaaaagaaaagatgcagttggtacaagaatcagaagagaagaaaagttaatactacatggagttaggcctggcgcagtggctcacgcctgtaatcccagcactttgggaggccgaggcgggtggatcaggtggtcaggagttcaagaccagcctgaccaacatggtgaaaccctgtctctactaaaaatacaaaaatcagccaggcttggtggcatgcgcctgtaatcccagctacttgggaggctgaggcaggagcatcacttgaacctgggaggcagaggtggcagtgagtcaagatcacgctgctgcactccagcctgggtgacagagcgagactccatctaaaaaaacaaaaagcaaaaaaacccacaaatacctcatggagatgaactgtaataattgcttaaagttccatttaattatgttaactctaatctagcaaaaacatagatgtacttaaaaataaatcatggataatgattttttaacccaaaaaaaaaaaaaaatgtgaaa

SEQ ID NO: 35 - DNA, 432 bp, Homo sapiens
  CDS 47..295
  sig_peptide 47..91: Von Heijne matrix score 6.32210467320472 seq LFLSLPVLVVVLS/IV
  polyA_site 420..432
  polyA_signal 395..400
aaccaagccctccagcaaggattcagagtgcccctccggcctcgccatgaggctcttcctgtcgcttccggtcctggtggtggttctgtcgatcgtcttggaaggcccagccccagcccaggggaccccagacgtctccagtgccttggataagctgaaggagtttggaaacacactggaggacaaggctcgggaactcatcagccgcatcaaacagagtgaactttctgccaagatgcgggagtggttttcagagacatttcagaaagtgaaggataaactcaagattgactcatgaggacctgaagggtgacatcccaggaggggcctctgaaatttcccacaccccagcgcctgtgctgaggactccctccatgtggccccaggtgccaccaataaaaatcctacagaaaactaawaaaaaaaaaaaaa

SEQ ID NO: 36 - DNA, 839 bp, Homo sapiens
  CDS 66..359
  sig_peptide 66..194: Von Heijne matrix score 6.07207487250823 seq FLIYVALLRVSEC/LP
  polyA_site 824..839
  polyA_signal 805..810
gggcgcgaggcggccaccgtggagagcagagcgcggcggctggaagctgctaagtcagagccgcgatgttccggattgagggcctcgcgccgaagctggacccggaggagatgaaacggaagatgcgcgaggatgtgatctcctccatacggaactttctcatctacgtggccctcctgcgagtcagtgagtgtctcccgggctgtgactgtgataccagcggggagctcaccgacgggcaccccttaactctaaggggtcatcggggccttcgaactgagctgaacggtagcggggagcaaggaggctccatttatcttaaagaaattggacagcatatgaagacaggacatcacatatgaatgcacgatatgaagagcctggttacagtttcgactcctctctgcaagtgaataggcccagaaaggtgtaagagactctttgaatggacataaaattctgcttgttaagaacaagtttggctctggtaactgaccttcaaagctaaaatataaaactatttgggaagtatgaaacgatgtctcgtgatctggtgtacccttatccctgtgacgtttggcctctgacaatactggtataattgtaaataatgtcaaactccgttttctagcaagtattaagggagctgtgtctgaaatggcactgtcttgtcagtcatttctgtttacctttttcttctgcccagagtgtatttgtgaaragtctcttatattatgttttgtggaaatcagcacacaaccacaatgacatttaagcacaggatcattattagtctatgtttttaataaacatatcaattatgaaaaaaaaaaaaaaaa

SEQ ID NO: 37 - DNA, 1114 bp, Homo sapiens
  CDS 117..362
  sig_peptide 117..245: Von Heijne matrix score 5.65876793443964 VVSFALIATLVYA/LF
  polyA_site 1083..1114
ataaggggacgtctagtgggttgcccgggaggggtggcgggagcggtcctggaaataatctgtcctctgtcgccgggaactggcgaggtagttccttcgcggtggagagacctggaatggccaaatatcaaggtgaagttcaaagtttgaaactggatgatgattcagttatagaaggagtaagcgaccaagtacttgtggcagttgtggtcagtttcgctttgattgctaccctggtatatgcacttttcagaaatgtacatcaaaacattcacccagaaaaccaggagctagtaagggtacttcgagaacagcttcaaacagaacaggatgcacctgctgactcgacagcagttctacactgacatgtactgtcccatctgcctgcaccaagcctccttcccggtggagaccaactgtggacatcttttttgtggtgcctgcattattgcttactggcgatatggttcatggcttggggcaatcagttgtccaatctgtagacaaacgagacatggccacattgcattgtccagaacagcttagaccatgacagttagcatcgaagccacctgaggagggaggcagtaaccttactcctaacagtatttggtgaagatgatcagtctcaggatgttctgagattgcatcaggatattaatgattataaccggagattctcagggcaacccagatctgtaagtaatgctaaagcatgttcaaagttagaggaagacacatttcttctcttttgtaaagtgaggtttaccaacaagtattctttgactatgagaaatcttggccaggcacagtagctaacgcctataatcctagcactttgggaggccaaggcaggtggatcacttgagcccaggagtttgagaccagccttggaaacatgatgaaaccccatctctagaaaaaacaccaaaaaattggacaagagtgttggcacatgcctgtagtccctgcttcttgggaggctgaaatgggaggatcacctgagcccaggaggttgaggctatagtgagccatgatcgcactattgcactcccacctgggtggcagtgagacccttcctcaaaaaacaagaaaagaaaaaaaaaaaaaaaaa

SEQ ID NO: 38 - DNA, 1112 bp, Homo sapiens
  CDS 117..362
  sig_peptide 117..245: Von Heijne matrix score 5.65876793443964 seq VVSFALIATLVYA/LF
  polyA_site 1097..1112
  polyA_signal 1089..1094
ataaggggacgtctagtgggttgcccgggaggggtggcgggagcggtcctggaaataatctgtcctctgtcgccgggaactggcgaggtagttccttcgcggtggagagacctggaatggccaaatatcaaggtgaagttcaaagtttgaaactggatgatgattcagttatagaaggagtaagcgaccaagtacttgtggcagttgtggtcagtttcgctttgattgctaccctggtatatgcacttttcagaaatgtacatcaaaacattcacccagaaaaccaggagctagtaagggtacttcgagaacagcttcaaacagaacaggatgcacctgctgactcgacagcagttctacactgacatgtactgtcccatctgcctgcaccaagcctccttcccggtggagaccaactgtggacatcttttttgtggtgcctgcattattgcttactggcgatatggttcatggcttggggcaatcagttgtccaatctgtagacaaacgagacatggccacattgcattgtccagaacagcttagaccatgacagttagcatcgaagccacctgaggagggaggcagtaaccttactcctaacagtatttggtgaagatgatcagtctcaggatgttctgagattgcatcaggatattaatgattataaccggagattctcagggcaacccagatctgtaagtaatgctaaagcatgttcaaagttagaggaagacacatttcttctcttttgtaaagtgaggtttaccaacaagtattctttgactatgagaaatcttggccaggcacagtagtaacgcctataatcctagcactttgggaggccaaggcaggtggatcacttgagcccaggagtttgagaccagccttggaaacatgatgaaaccccatctctagaaaaaacaccaaaaaattggacaagagtgttggcacatgcctgtagtccctgcttcttgggaggctgaaatgggaggatcacctgagcccaggaggttgaggctatagtgagccatgatcgcactattgcactcccacctgggtggcagtgagacccttcctcaaaaaacaagaaaagaaaaaaaaaaaaaaaa

SEQ ID NO: 39 - DNA, 1112 bp, Homo sapiens
  CDS 117..362
  sig_peptide 117..245: Von Heijne matrix score 5.65876793443964 seq VVSFALIATLVYA/LF
  polyA_site 1097..1112
  polyA_signal 1089..1094
  Unsure 339..341: Xaa = Ala or Gly
ataaggggacgtctagtgggttgcccgggaggggtggcgggagcggtcctggaaataatctgtcctctgtcgccgggaactggcgaggtagttccttcgcggtggagagacctggaatggccaaatatcaaggtgaagttcaaagtttgaaactggatgatgattcagttatagaaggagtaagcgaccaagtacttgtggcagttgtggtcagtttcgctttgattgctaccctggtatatgcacttttcagaaatgtacatcaaaacattcacccagaaaaccaggagctagtaagggtacttcgagaacagcttcaaacagaacaggatgcacctgstgactcgacagcagttctacactgacatgtactgtcccatctgcctgcaccaagcctccttcccggtggagaccaactgtggacatcttttttgtggtgcctgcattattgcttactggcgatatggttcatggcttggggcaatcagttgtccaatctgtagacaaacgagacatggccacattgcattgtccagaacagcttagaccatgacagttagcatcgaagccacctgaggagggaggcagtaaccttactcctaacagtatttggtgaagatgatcagtctcaggatgttctgagattgcatcaggatattaatgattataaccggagattctcagggcaacccagatctgtaagtaatgctaaagcatgttcaaagttagaggaagacacatttcttctcttttgtaaagtgaggtttaccaacaagtattctttgactatgagaaatcttggccaggcacagtagtaacgcctataatcctagcactttgggaggccaaggcaggtggatcacttgagcccaggagtttgagaccagccttggaaacatgatgaaaccccatctctagaaaaaacaccaaaaaattggacaagagtgttggcacatgcctgtagtccctgcttcttgggaggctgaaatgggaggatcacctgagcccaggaggttgaggctatagtgagccatgatcgcactattgcactcccacctgggtggcagtgagacccttcctcaaaaaacaagaaaagaaaaaaaaaaaaaaaa

SEQ ID NO: 40 - DNA, 1112 bp, Homo sapiens; identical to SEQ ID NO: 38
  CDS 117..362
  sig_peptide 117..245: Von Heijne matrix score 5.65876793443964 seq VVSFALIATLVYA/LF
  polyA_site 1097..1112
  polyA_signal 1089..1094

SEQ ID NO: 41 - DNA, 508 bp, Homo sapiens
  CDS 17..313
  sig_peptide 17..100: Von Heijne matrix score 5.67441405983879 seq LGYLVLSEGAVLA/SX
  polyA_site 493..508
  polyA_signal 468..473
  Unsure 104..106: Xaa = Phe or Ser
  Unsure 146..148: Xaa = Phe or Ser
agcaccgaagactgcgatgacttctgcactgacccaggggctggagcgaatcccagaccagctcggctacctggtactgagtgaaggtgcagtgctggcgtcatytggggacctggagaatgatgagcaggcagccagtgccatctytgagctggtcagcacagcctgcggtttccggctgcaccgcggcatgaatgtgcccttcaagcgcctgtctgtggtctttggagaacacacactgctggtgacggtgtcaggacagagggtgtttgtggtgaagaggcagaaccgaggtcgggagcccattgatgtctgagcctgccggagggcgagggtcggagaagcggattgggccttctgctcgcccacctcccacccctacctggacgggcccaggcttggggactctgagctgtgttaaggagaacaagggcaaggagacctccctttgtgctccctcactccctaataaacatgagtctgatgttctccaaaaaaaaaaaaaaaa

SEQ ID NO: 42 - DNA, 623 bp, Homo sapiens
  CDS 69..365
  sig_peptide 69..152: Von Heijne matrix score 5.54338579743238 seq LGYLVLSEGAVLA/SS
  polyA_site 608..623
  polyA_signal 582..587
  Unsure 198..200: Xaa = Phe or Ser
acgtgaccggggcctgaagccggaagctacctatctggtagggagctcccccagcaccgaagactgcgatgacttctgcactgacccaggggctggagcgaatcccagaccagctcggctacctggtactgagtgaaggtgcagtgctggcgtcatctggggacctggagaatgatgagcaggcagccagtgccatctytgagctggtcagcacagcctgcggtttccggctgcaccgcggcatgaatgtgcccttcaagcgcctgtctgtggtctttggagaacacacactgctggtgacggtgtcaggacagagggtgtttgtggtgaagaggcagaaccgaggtcgggagcccattgatgtctgagcctgccggagggcgagggtcggagaagcggattgggtcctgggcctctgtgatgaggcaggcacacctgtcggtcttggcttgctgctagaactagggccttytgstcgcccacctcccacccctacctggacgggcccaggcttggggactytgagctgtgttaaggagaacaagggcaaggagacctccctttgtgctccctcactccctaataaacatgagtctgatgttctccgaaaaaaaaaaaaaaaa

SEQ ID NO: 43 - DNA, 1166 bp, Homo sapiens
  CDS 2..559
  sig_peptide 2..46: Von Heijne matrix score 5.34456047740956 seq VMAASMARGGVSA/RV
  polyA_site 1151..1166
  Unsure 77..79: Xaa = Cys or Trp
  Unsure 155..157: Xaa = Cys or Gly
  Unsure 491..493: Xaa = Arg or Gly
gatgcatgtcatggccgcctccatggcccggggaggcgtgagtgccagggttctactgcaggctgccaggggcacctgktggaacagacctgggggcacttccgggtcgggggagggggtggcgctggggacaaccagaaagtttcaagcgacakgctcgcgcccggctggagaggaggacgcgggcggcccggagcggcccggggacgtggtgaacgtggtgttcgtagaccgctcaggccagcggatcccagtgagtggcagagtcggggacaatgttcttcacctggcccagcgccacggggtggacctggaaggggcctgtgaagcctccctggcctgctccacctgccatgtgtatgtgagtgaagaccacctggatctcctgcctcctcccgaggagagggaagacgacatgctagacatggcccccctcctccaggagaactcgcggctgggctgccagattgtgctgacaccggagctggaargagcggaattcaccctgcccaagatcaccaggaacttctacgtggatggccatgtccccaagccccactgacatgaacacctggaccattccacattgccatggccccagggcccagattgagggaatagccaggtgccagccctgcccagagtgcggacaggcccgggagagacgtggaagcccctgtgaaggacaacacccctgcttgggagagagtcccatgtccaggctctggtggggacagggcccctagtggggtggccttccccaggcccctgagaatcagggtttgagtaggagtggactcatattggagctgcaataaatcgataacacaggccccagcatgttgagtgtccttgggggacagatctggggtctacaggtggctcacacctgtaatcctagcactttgggaagccaagatgggaggatcacttgaggccaggagcttaagaccatcctgggcaacatggcgagacctcgtctctataaaaacagtaaaaattagcgtggagtggtggtaagtgcctgtagtcccagctactcgggagactgaggtgggaggatcacttagcccaggggatttaggctgcagtggagcggtgatcaggccattccactccagcctgggtgacagagtgaggccctgtctctaaaaaaaaaaaaaaaa

SEQ ID NO: 44 - DNA, 649 bp, Homo sapiens
  CDS 18..386
  sig_peptide 18..161: Von Heijne matrix score 5.26064226788865 seq LLMLLLFLSELQY/YL
  polyA_site 634..649
  polyA_signal 611..616
  Unsure 384..386: Xaa = Ala or Asp
ctttccggccggtccccatggaggcgctggggaagctgaagcagttcgatgcctaccccaagactttggaggacttccgggtcaagacctgcgggggcgccaccgtgaccattgtcagtggccttctcatgctgctactgttcctgtccgagctgcagtattacctcaccacggaggtgcatcctgagctctacgtggacaagtcgcggggagataaactgaagatcaacatcgatgtactttttccgcacatgccttgtgcctatctgagtattgatgccatggatgtggccggagaacagcarctggatgtggaacacaacctgttcaagcaacgactagataaagatggcatccccgtgagctcagaggctgagcggcatgmttaatgcaggacaccagtggaaccaacataatttgctataggactggatgtggagtggaggagagcaaagtcatggttgttgattccaacgctttcagcctgagcaaatgaatgacttgagatggagatgactggaggagaaggtttttttggtgggagggaggagtggctattggatatccmctgctgtgtaacaaagtactccaaaagttagtagtttgatacaataaaaatgtgttttttcagtcaaaaaaaaaaaaaaaa

SEQ ID NO: 45 - DNA, 836 bp, Homo sapiens
  CDS 87..317
  sig_peptide 87..173: Von Heijne matrix score 5.19818357425197 seq LLLKLQRLPQAEP/VE
  polyA_site 821..836
  polyA_signal 805..810
gagtgtggggccagccgtggaggctccaggtgttctctctgccccagcagagcccggcaggagccccaacaggaagccagcgcggcatggctgccaccgacttcgtgcaggagatgcgcgccgtgggcgagaggctgctgctcaagctgcagagactgccccaggctgagcccgtggagatcgtggccttctcagtcatcatccttttcacagctactgttctgctgttgctgctgatagcctgcagctgctgctgcactcactgctgctgccctgagcggagaggcaggaaggtccaggtgcagccgacaccaccatgacggacgggcgatggctgaggagaagctggagaggagatggccaatgccatgacacaggccatcagcctggccctgcagcccttacccctcaagaccaggctcccctggccccagctctggcccagcccaggtacctggacactgacaacttgagccctaccaaggaaacaagggctggtataggtgcaaacctctcatctgccagtggacactgggtgctggggagtcagctgtttcaaagactgggtcaactgcctgggcttcttcgcctacctgcactttttaacaaaacaaggaagtaggggtccccataccttgatggagaacagtccccacctgtgggcaattggcccttggggctctgctgatacatgccaaagaggagcaaggcaatcagaggggctttgtgcaatagcttctgcatccgagctcccgccagagcgtgagcatgtcagtattctagtccagtatttgccagtttccaagtaaaagcttttgtgaaaaaaaaaaaaaaaa

SEQ ID NO: 46 - DNA, 482 bp, Homo sapiens
  CDS 17..337
  sig_peptide 17..97: Von Heijne matrix score 4.95181310301952 seq VLSTLSLVQFSPS/GR
  polyA_site 467..482
  polyA_signal 442..447
actttagctgctgcagatgctgtttgaagaagctctgcccctcagctgctctgatcctgtgcttagcactcttagcctggtgcagttcagccccagtggaaggacccaggacctgctctctccaggggtggagaacctgtcggtgctggacgtgtcccctctgggcttggcctgctgtctgctcactctcaccatgtcctgcccagggcctgaccctcctgaggggcccgggacccagcgtgtgtggcaaggggctctacggatcctacagctcccaggagccccagatggggtttcaccatatcagccagtctggtctcgaactcctgacctcaagtgattcgccagcctcgtcctcccaaagtgctgggattacagatgtgagccaccatgcccatggagaatgtattacttttgtaatttaaaaaataatagtaataaaataaagatctttacaatgtttcagaaaaaaaaaaaaaaaa

SEQ ID NO: 47 - DNA, 806 bp, Homo sapiens
  CDS 136..471
  sig_peptide 136..252: Von Heijne matrix score 4.89253405263876 seq IILFSAIVGFIYG/YV
  polyA_site 792..806
  polyA_signal 775..780
ttcgctctcccgggcttagaaggcccggctactgacgcgcagtgccagaccttacccctcacggtccttaagtctcggtcgccctcgcctcgcagcctgccacccgcgctcagctgcccgcctcctcagccagccatgctggagcatctgagctcgctgcccacgcagatggattacaagggccagaagctagctgaacagatgtttcagggaattattcttttttctgcaatagttggatttatctacgggtacgtggctgaacagttcgggtggactgtctatatagttatggccggatttgctttttcatgtttgctgacacttcctccatggcccatctatcgccggcatcctctcaagtggttacctgttcaagcacagacgacaagaaaccaggggaaagaaaaattaagaggcatgctaaaaataattgaggttttcatgattcagcacctgcttttgtttctgtgagatgagctaaattgctttcataccccagataagagctaaaaccacctaatgctcttatggcacagctgtgtatagatttagttctctttatacttcatttctagcccagttgggttttgatttatataagtagtttagaccttctcttcataatcttgctctgagatggggaacagaacacacaagtatgaagtttctttcaggtgtaaataatgaaaaataaatgcctcataaatgatagtacaatgtaactatcaaagttttataattcattatgagttaaccattttaatgtttccaattaaacctcatagtgcaaaaaaaaaaaaaaa

SEQ ID NO: 48 - DNA, 582 bp, Homo sapiens
  CDS 148..360
  sig_peptide 148..216: Von Heijne matrix score 5.918755252201 SALMLLPCRPVLT/SV
  polyA_site 566..582
  polyA_signal 544..549
aacgtcatctaggagcaccgagcagcttggctaaaagtaagggtgtcgtgctgatggccctgtgcgcactgacccgckctsygctctctgaacctggcgcccccgaccgtcgccgcccctgccccgagtctgttccccgccgcccagatgatgaacaatggcctcctccaacagccctctgccttgatgttgctcccctgccgcccagttcttacttctgtggcccttaatgccaactttgtgtcctggaagagtcgtaccaagtacaccattacaccagtgaagatgaggaagtctgggggccgagaccacacaggtgctggaaacgtgcgtagcaacagtaggccgagtatccaacgttgatcataacaaacgggtcattggcaaggcaggtcgcaaccgctggctgggcaagaggcctaacagtgggcggtggcaccgcaaggggggctgggctggccgaaagattcggccactaccccccatgaagagttacgtgaagctgccttctgcttctgcccaaagctgatatccctgtactctaataaaatgccccccccccctcaaaaaaaaaaaaaaaaa

SEQ ID NO: 49 - DNA, 583 bp, Homo sapiens
  CDS 149..361
  sig_peptide 149..217: Von Heijne matrix score 5.918755252201 SALMLLPCRPVLT/SV
  polyA_site 567..583
  polyA_signal 545..550
aacgtcatctaggagcaccgagcagcttggctaaaagtaagggtgtcgtgctgatggccctgtgcgcactgacccgcgctctgcstctctgaacctggcgcccccgaccgtcgccgcccctgccccgagtctgttccccgccgcccagatgatgaacaatggcctcctccaacagccctctgccttgatgttgctcccctgccgcccagttcttacttctgtggcccttaatgccaactttgtgtcctggaagagtcgtaccaagtacaccattacaccagtgaagatgaggaagtctgggggccgagaccacacaggtgctggaaacgtgcgtagcaacagtaggccgagtatccaacgttgatcataacaaacgggtcattggcaaggcaggtcgcaaccgctggctgggcaagaggcctaacagtgggcggtggcaccgcaaggggggctgggctggccgaaagattcggccactaccccccatgaagagttacgtgaagctgccttctgcttctgcccaaagctgatatccctgtactctaataaaatgccccccccccctcaaaaaaaaaaaaaaaaa

SEQ ID NO: 50 - DNA, 746 bp, Homo sapiens
  CDS 83..358
  sig_peptide 83..127: Von Heijne matrix score 4.68058603039206 VLAGSLLGPTSRS/AA
ctttttttcctttgttccagggctggagcggctctgggctccggaatcgcccgcagccggtactgcgggacccactgcggatatggctgtcttggctggatccctgttgggccccacgagtaggtcggcagcgttgctgggtggcaggtggctccagccccgggcctggctggggttcccagacgcctggggcctccccaccccgcagcaggcccggggcaaggctcgcgggaatgagtatcagccgagcaacatcaaacgcaagaacaagcacggctgggtccggcgcctgagcacgccagccggcgtscaggtcatccttcgccgaatgctcaagggccgcaagtcgctgagccattgaggatcgcgacgcagtcggcgggaccctcatggaagcatcgccctcgcctcggaccttgcctggcgctatttttgcagggagctggggagcaggaacgcctcggacctgagtgctctccatattgtggggttgaagtctggatgggagcttgccaagtccctttttaggctttttaattaggaagcatttcgaacctgcgcaacagaccaaagaacagtacaaagaacatccgtgtacccagtaccctgactaccgactacctacaacccgtccctgccccatcctgagttcttttgaagctgatctcaggcatcggattatttcttctgtaaatatttcagaatgtatctctccaagatgagagctcattaaaagacaattacaa

SEQ ID NO: 51 - DNA, 731 bp, Homo sapiens
  CDS 73..348
  sig_peptide 73..117: Von Heijne matrix score 4.68058603039206 seq VLAGSLLGPTSRS/AA
  Unsure 283..285: Xaa = Asn or Ser
gttgttccagggctggagcggctctgggctccggaatcgcccgcagccggtactgcgggacccactgcagatatggctgtcttggctggatccctgttgggccccacgagtaggtcggcagcgttgctgggtggcaggtggctccarccccgggcctggctggggttcccagacgcctggggcctccccaccccgcagcaggcccggggcaaggctcgcgggaatgagtatcagccgagcaatatcaaacgcaagaacaagcacggctgggtccggcgcctgarcacgccggccggcgtgcaggtcatccttcgccgaatgctcaagggccgcaagtcgctgagccattgaggatcgcgacgcagtcggcgggaccctcatggaagcatcgccctcgcctcggaccttgcctggcgctatttttgcagggagctggggagcaggaacgcctcggacctgagtgctctccatattgtggggttgaagtctggatgggagcttgccaagtccctttttaggctttttaattaggaagcatttcgaacctgcgcaacagaccaaagaacagtacaaagaacatccgtgtacccagtaccctgactaccgactacctacaacccgtccctgccccatcctgagttcttttgaagctgatctcaggcatcggattatttcttctgtaaatatttcagaatgtatctctccaagatgagagctcattaaaagataat

SEQ ID NO: 52 - DNA, 773 bp, Homo sapiens
  CDS 22..297
  sig_peptide 22..66: Von Heijne matrix score 4.68058603039206 seq VLAGSLLGPTSRS/AA
  polyA_site 758..773
  polyA_signal 740..745
  Unsure 232..234: Xaa = Asn or Ser
  Unsure 250..252: Xaa = Arg, Gln, or Lys
actgcgggacccactgcggatatggctgtcttggctggatccctgttgggccccacgagtaggtcggcagcgttgctgggtggcaggtggctccagccccgggcctggctggggttcccagacgcctggggcctccccaccccgcagcaggcccggggcaaggctcgcgggaatgartatcagccgagcaatatcaaacgcaagaacaagcacggctgggtccggcgcctgarcacgccggccggcgtgmrggtcatccttcgccgaatgctcaagggccgcaagtcgctgagccattgaggatcgcgacgcagtcggcgggaccctcatggaagcatcgccctcgcctcggaccttgcctggcgctatttttgcagggagctggggagcaggaacgcctcggacctgagtgctctccatattgtgggtttgaagtctggatgggagcttgccaagtccctttttaggctttttaattaggaagcatttcgaacctgcgcaacagaccaaagaacagtacaaagaacatccgtgtacccagtaccctgactaccgactacctacaacccgtccctgccccatcctgagttcttttgaagctgatctcaggcatcggattatttcttctgtaaatatttcagaatgtatctctccaagatgagagctcattaaaagataattacaaagcttatcacatccaaaagaattatcaataattttgaaatattattaaacgtgtaataaatgttcaaagttcaaaaaaaaaaaaaaaa

SEQ ID NO: 53 - DNA, 740 bp, Homo sapiens
  CDS 80..355
  sig_peptide 80..124: Von Heijne matrix score 6.4806443024348 seq VLAGSLLXPTSRS/AA
  Unsure 107..109: Xaa = Asp or Gly
  Unsure 140..142: Xaa = Gly or Ser
  Unsure 290..292: Xaa = Asn or Ser
  Unsure 305..307: Xaa = Glu, Leu, Val, or *
  Unsure 308..310: Xaa = Ala, Gln, Glu, or Pro
  Unsure 311..313: Xaa = Phe or Val
ataatcctttgttccagggctggagcggctctgggctccggaatcgcccgcagccggtactgcgggacccactgcggatatggctgtcttggctggatccctgttggrccccacgagtaggtcggcagcgttgctgggtrgcaggtggctccagccccgggcctggctggggttcccagacgcctggggcctccccaccccgcagcaggcccggggcaaggctcgcgggaatgagtatcagccgagcaacatcaaacgcaagaacaagcacggctgggtccggcgcctgarcacgccggccggckwrsmgktcatccttcgccgaatgctcaagggccgcaagtcgctgagccattgaggatcgcgacgcagtsgscggggaaccctcatggaagcatcgccctcgcctcggaccttgcctggcgctatttttgcagggagctggggagcaggaacgcctcggacctgagtgctctccatattgtggggttgaagtctggatgggagcttgccaagtccctttttaggctttttaattaggaagcatttcgaacctgcgcaacagaccaaagaacagtacaaagaacatccgtgtacccagtaccctgactaccgactacctacaacccgtccctgccccatcctgagttcttttgaagctgatctcaggcatcggattatttcttctgtaaatatttcagaatgtatctctccaagatgagagctcattaaaagacaat

SEQ ID NO: 54 - DNA, 638 bp, Homo sapiens
  CDS 137..397
  sig_peptide 137..253: Von Heijne matrix score 4.61343345943784 seq LQGARVLLTGANA/GV
  polyA_site 623..638
  polyA_signal 616..621
ggggtgcggtcggggacccggcaggaggcggccgagaagagaggaccgtgggggcgttcgcgtggctcccagcccgggaccccacccccgctggacagtgggggaaactgaggcctgagcgggcccacacaggaccatgaaggtgcttctcctcacagggctgggggccctgttcttcgcctattattgggatgacaacttcgacccagccagcctccagggagcgcgagtgctgctgacaggggccaacgctggtgttggtgaggagctggcctatcactacgcgcgtctgggctcccacctggtgctcactgcccacactgaggctctcctgcagaaggcacggtggctcacgcttgtagtcagcactttgggaggccgaggaaagtggatcacctgaggtcaggagttcaagaccagcctggccaacatggcgaaacctggtctctactaagaagacaaaaattaggccaggcatggtggctcatgcctgtaatcctagcactttgggaggccaaggcggatggatcacttgaggtcaggagttcaaaaccagcctggccaacatggtgaaaccctgtctctactaaaaatacaaaaaataaaaataaaataaataaacaaaaaaaaaaaaaaaa

SEQ ID NO: 55 - DNA, 577 bp, Homo sapiens
  CDS 18..392
  sig_peptide 18..62: Von Heijne matrix score 4.60228634566274 seq LLTHNLLSSHVRG/VG
  polyA_site 562..577
  polyA_signal 545..550
  Unsure 150..152: Xaa = Ile or Met
  Unsure 360..362: Xaa = Asn or Thr
tttttttgtgcggcgacatgaaactgcttacccacaatctgctgagctcgcatgtgcggggggtggggtcccgtggcttccccctgcgcctccaggccaccgaggtccgtatctgccctgtggaattcaaccccaacttcgtggcgcgtatratacctaaagtggagtggtcggcgttcctggaggcggccgataacttgcgtctgatccaggtgccgaaagggccggttgagggatatgaggagaatgaggagtttctgaggaccatgcaccacctgctgctggaggtggaagtgatagagggcaccctgcagtgcccggaatctggacgtatgttccccatcagccgcgggatcccmamcatgctgctgagtgaagaggaaactgagagttgattgtgscaggcgccagtttttcttgttatgactgtttatttttgttgatctataccctgtttccgaattctgccgtgtgtatccccaacccttgacccaatgacaccaaacacagtgtttttgagctcggtattatatatttttttctcattaaaggtttaaaaccaaaaaaaaaaaaaaaa

SEQ ID NO: 56 - DNA, 521 bp, Homo sapiens
  CDS 82..360
  sig_peptide 82..147: Von Heijne matrix score 4.53239781724629 seq FFLLITIALGTKT/ES
  polyA_site 506..521
  polyA_signal 486..491
attttctcaacaattcctcaccgcaggagcctctgaagctcccaccaggccagctctcctcccacaacagcttcccacagcatgaagatctccgtggctgccattcccttcttcctcctcatcaccatcgccctagggaccaagactgaatcctcctcacggggaccttaccacccctcagagtgctgcttcacctacactacctacaagatcccgcgtcagcggattatggattactatgagaccaacagccagtgctccaagcccggaattgtcttcatcaccaaaaggggccattccgtytgtaccaaccccagtgacaagtgggtccaggactatatcaaggacatgaaggagaactgagtgacccagaaggggtggcgaaggcacagctcagagacataaagagaagatgccaaggccccctcctccacccaccgctaactctcagccccagtcaccctcttggagcttccctgctttgaattaaagaccactcatgcccaaaaaaaaaaaaaaaa

SEQ ID NO: 57 - DNA, 588 bp, Homo sapiens
  CDS 93..308
  sig_peptide 93..218: Von Heijne matrix score 4.46006149913644 seq LRLEVAAAPGTPA/QP
  polyA_site 573..588
  polyA_signal 558..563
aaaagaaattcccgggcccggccagcctgtgccgctgttatgaggagaagcaaagccccttgcagaagcacttgcgggtctgcagcctacgcatgaataggttggcaggtgtgggctggcgggtggactacaccctgagctccagcctgctgcaatccgtggaagagcccatggtgcacctgcggctggaggtggcagctgccccagggaccccagcccagcctgttgccatgtccctctcagcagacaagttccaggtcctcctggcagaactgaagcaggcccagaccctgatgagctccctgggctgaggagaagggtgttccaggcctgtgtggagccgccctgcccgtatggagtcacgccctctgaactgctcttcgggaggcagccctggttctaggatgctgaggccctggcccggactctggcctcccagatccccagctgcctcacttctctcttgagaacttggctcagggctcctgaggacctttcccagcattaccttcccttcccttgaaaggcaattgttggctgttttcataagcaggaaaaataaacagaagtacaaaaaaaaaaaaaaaa

SEQ ID NO: 58 - DNA, 521 bp, Homo sapiens
  CDS 113..364
  sig_peptide 113..172: Von Heijne matrix score 4.37180298395146 SLLLSLPPHQGLT/FS
  polyA_site 500..521
ttttttacatggtgttcccacagctgggaggacacccacatggtcggcgtgcaggatatttcgctggaccctagaaaagccaccacgacctgtgggccatgatgctaccccaatggctgctgctgctgttccttctcttcttctttctcttcctcctcaccaggggctcactttctccaacaaaatacaaccttttggagctcaaggagtcttgcatccggaaccaggactgcgagactggctgctgccaacgtgctccagacaattgcgagtcgcactgccggagaaggggtccgagggcagtctgtgtcaaacgcagctgccagctactccatgcttcctgccttcgaatacggtgagaacgtgaagtcatgagctgctgctaaggcatgtggcaaccttgaagagaaggtcaagagctaccagccaccaaaagaatgccagcacttcctgtgtctttgctttggattcatgagaaatatacgttcctatttgcttcaaaaaaaaaaaaaaatgcgaaa

SEQ ID NO: 59 - DNA, 516 bp, Homo sapiens
  CDS 83..244
  sig_peptide 83..139: Von Heijne matrix score 4.24406450728052 seq LLILSKVLDDTFQ/SV
  polyA_site 501..516
actgctatagcgatataactcagatgttctcaggacagcaagtttacatgtgaatagagagggagggacgtgttaggaagacatgaaattcaattttgtacttttgatactttccaaagttctagatgacactttccaaagtgtcaagaaatggttaaattattttcagtttactttaagaaatggtttaatgtggccaggtgcggtggctcatgcctgtaatcccagcactggctcacgcctgtaatcccagcactttgggagtccgaggtgggcagatcatgaggtcaggagatcgagaccatcctggctaacatggtgaaaccccgtctctactaaaaatacaaaaaaattagccaggcatggtggcgggcgcctgtagtcccagctactcgggaggctgaggcaggagaatggcgtgaacctgggaggcggagcttacagtgagccgagatcgcgccactgcactccagcctgggcgacagagcgagactctgttcaaaaaaaaaaaaaaaa

SEQ ID NO: 60 - DNA, 517 bp, Homo sapiens
  CDS 83..244
  sig_peptide 83..139: Von Heijne matrix score 4.24406450728052 LLILSKVLDDTFQ/SV
  polyA_site 502..517
actgctatagcgatataactcagatgttctcaggacagcaagtttacatgtgaatagagagggagggacgtgttaggaagacatgaaattcaattttgtacttttgatactttccaaagttctagatgacactttccaaagtgtcaagaaatggttaaattattttcagtttactttaagaaatggtttaatgtggccaggtgcggtggctcatgcctgtaatcccagcactggctcacgcctgtaatcccagcactttgggagtccgaggtgggcagatcatgaggtcaggagatcgagaccatcctggctaacatggtgaaaccccgtytctactaaaaatacaaaaaaattagccaggcatggtggcgggcgcctgtagtcccagctactcgggaggctgaggcaggagaatggcgtgaacctgggaggcggagcttacagtgagccgagatcgcgccactgcactccagcctgggcgacagagcgagactctgtttcaaaaaaaaaaaaaaaa

SEQ ID NO: 61 - DNA, 518 bp, Homo sapiens
  CDS 84..245
  sig_peptide 84..140: Von Heijne matrix score 4.24406450728052 LLILSKVLDDTFQ/SV
  polyA_site 503..518
aactgctatagcgatataactcagatgttctcaggacagcaagtttacatgtgaatagagagggagggacgtgttaggaagacatgaaattcaattttgtacttttgatactttccaaagttctagatgacactttccaaagtgtcaagaaatggttaaattattttcagtttactttaagaaatggtttaatgtggccaggtgcggtggctcatgcctgtaatcccagcactggctcacgcctgtaatcccagcactttgggagtccgaggtgggcagatcatgaggtcaggagatcgagaccatcctggctaacatggtgaaaccccgtctctactaaaaatacaaaaaaattagccaggcatggtggcgggcgcctgtagtcccagctactcgggaggctgaggcaggagaatggcgtgaacctgggaggcggagcttacagtgagccgagatcgcgccactgcactccagcctgggcgacagagcgagactctgtttcaaaaaaaaaaaaaaaa

SEQ ID NO: 62 - DNA, 548 bp, Homo sapiens
  CDS 57..329
  sig_peptide 57..113: Von Heijne matrix score 4.2427958051416 seq FVLLLSEIVSISA/LS
  polyA_site 533..548
  polyA_signal 505..510
agttgtctttggtagtttttttgcactaacttcaggaaccagctcatgatctcaggatgtatggaaaaataatctttgtattactattgtcagaaattgtgagcatatcagcattaagtaccactgaggtggcaatgcacacttcaacctcttcttcagtcacaaagagttacatctcatcacagacaaatggagaaatgggacaacttgtccatcgtttcactgtaccagctcctgtagtgataatactcattattttgtgtgtgatggctggtattattggaacgatcctcttaatttcttacagtattcgccgactgataaaggcatgaggatgtggcctgcatgctgcctgatcttgcctagaaccggctgcacctgctgttctcttgtttatgcaaactggctgcacctgctattcctttgcttatgcccctacccctggctatcctaattccctgttctcctgcctcactattactgtattctctacttctaaataaaaataaaacaaaatacaaaccgttaaaataaaaaaaaaaaaaaaa

SEQ ID NO: 63 - DNA, 722 bp, Homo sapiens
  CDS 331..672
  sig_peptide 331..426: Von Heijne matrix score 4.21873806574589 seq LLGSGLFVFSLTA/FN
  polyA_site 707..722
  polyA_signal 688..693
tttttcctcgtcctctcccgacagagctgacgtgtcctgggttccaccgggagcgggcatttccaccggacgggagggttcggggtgtccggggctggggaatacgtaggggttgccgcgcggtgtggggagttggggcgtgtggctgcagtcccgggagttcttggagggggtcggcccaccgagcttccggaccggctgatctgcccgtagcttgccggagggagggcggagcctgactctccgtcccttctcccatcccctccagtggtgggtacgggcacctcgctggcgctctcctccctcctgtccctgctgctctttgctgggatgcagatgtacagccgtcagctggcctccaccgagtggctcaccatccagggcggcctgcttggttcgggtctcttcgtgttctcgctcactgccttcaataatctggagaatcttgtctttggcaaaggattccaagcaaagatcttccctgagattctcctgtgcctcctgttggctctctttgcatctggcctcatccaccgagtctgtgtcaccacctgcttcatcttctccatggttggtctgtactacatcaacaagatytcctccaccctgtaccaggcagcagctccagtcctcacaccagccaaggtcacaggcaagagcaagaagagaaactgaccctgaatgttcaataaagttgattctttgcaaaaaaaaaaaaaaaa

SEQ ID NO: 64 - DNA, 479 bp, Homo sapiens
  CDS 96..320
  sig_peptide 96..200: Von Heijne matrix score 4.14350049367799 seq MAVAFVLSLGVAA/LY
  polyA_site 464..479
  polyA_signal 437..442
attctgcgcctgcgcgcgtctacagcacggttcgtttttcctttagtcaggaaggacgttggtgttgagcatacgtatcaaggacagtaaytaccatggctcccgaagttttgccaaaacctcggatgcgtggccttctggccaggcgtctgcgaaatcatatggctgtagcattcgtgctatccctgggggttgcagctttgtataagtttcgtgtggctgatcaaagaaagaacgcatacgcagatttctacagaaactacgatgtcatgaaagattttgaggagatgaggaaggctggtatctttcagagtgtaaagtaatcttggaatataaagaatttcttcaggttgaattacctagaagtttgtcactgacttgtgttcctgaactatgacacatgaatatgtgggctaagaaatagttcctcttgataaataaacaattaacaaatactttggacaaaaaaaaaaaaaaaa

SEQ ID NO: 65 - DNA, 1627 bp, Homo sapiens
  CDS 90..413
  sig_peptide 90..209: Von Heijne matrix score 4.06476262296284 seq VTAPSMVAPVTFA/SI
  polyA_site 1612..1627
  polyA_signal 1577..1582
aatctctgcgaaagcttccaggttcgctcatcgtaggtcactggaaaaaattgtagcattgctaaagagtatttcagagaaaattttgcatgcaaaaatttaggaagatgagtgaaactcatcattctgtaatctctgtgaaagcttccagtccctggctatcttcttcagtgactgctccatccatggtagccccagtcacttttgcatctattgtagaagaagaactacaacaagaagcagctcttattagaagtcgagaaaaaccgttggctctgattcagattgaggagcatgccatacaagatttattggttttctatgaggcatttggcaaccctgaagagtttgtcattgttgaaaggacaccgcagggaccactggcagtacctatgtggaataagcatggatgctagttcactgtggagttgagatgcattttacataattatgagtttgttcatataaagaaaagctgtggaaaagagtcttagagattttgtaatatcattctaaatagattaagaaaagatataatttctttactgcagttaaatcatataatgtttgtatgattaaaaataaatttctcagaattgtgattttagtaactttatataaaatgtgtgagacaaaaacttattaaggttaaatagaattgtttcttstgaatratctaacaaaggaraatataagtgattgaatcataagatataaggggggtaaagtattaaaaataacttttttgtttgataacttgagaatttagaagattttgccaagtatgtgttgttgcttgacttcttaaatatggcattgatgaatttaaagtaggagcatcagttattacttctgattcattaatggccagaattttgtgtttggtgtaatagttgtgtcaccattcttgttgctttttaaaaatcaggctaatcatgtggtccatgtctcttcaaagcttgacctgcacaaatgccatatttcyatttggaccacatattctccattttgcattgagcagtagagtacagtggaaagggaataagaatactgattattctgaacagtttagtcccaagagaatagcgttttaaaaaagaaaaacaagatttggagtcattgtgggttatttttggtgggatggaggatcttaaaaatgcctaattgtgagagaatcaattgctgaaagtgttaaaatttctgaaaataaatgcttaattacatatacaggaattaaatagtttggaagagggttggattatcattacctttacaatactgtataatcagaagttctctgaacctcaattgtatatctagacataaaaattgttttctgtataggatgttgtttggtttgtttctgagtgtttaaattttgcaaaaacaaatgttaaatttgtgcttcagtacctagataaattggaaaggttaatgttctagtttctggaaggtaagcctgggagacacataagcaattcactgctataatttagttgatgtaaaatgacggaaactggctcaatatgtcaggtttaactctgcccaaaagcagcagacatgtaagcagatgtgcaataaaaaatgatcttgatccatttcaaaaaaaagaaaaaaaaaaaaaaaa

SEQ ID NO: 66 - DNA, 555 bp, Homo sapiens
  CDS 9..389
  sig_peptide 9..149: Von Heijne matrix score 3.92635967755835 seq LSSDLQQVGGASA/RI
  polyA_site 540..555
  polyA_signal 512..517
tgggagtgatgttcacgcctctgacagtgaaatacgcgtactacgacactgaacgcatcggagttgacctgatcatgaagacctgctttagccccaacagagtgattggactctcaagtgacttgcagcaagtaggaggggcatcagctcgcatccaggatgccctgagtacagtgttgcaatatgcagaggatgtactgtctggaaaggtgtcagctgacaatactgtgggccgcttcctgatgagcctggttaaccaagtaccgaaaatagttcccgatgactttgagaccatgctcaacagcaacatcaatgaccttttgatggtgacctacctggccaacctcacacagtcacagattgcactcaatgaaaaacttgtaaacctgtgaatggaccccaagcagtacacttgctggtctaggtattaaccccaggactcagaagtgaaggagaaatgggttttttgtggtcttgagtcacactgagatagtcagttgtgtgtgactctaataaacggagcctaccttttgtaaattaaaaaaaaaaaaaaaa

SEQ ID NO: 67 - DNA, 422 bp, Homo sapiens
  CDS 24..278
  sig_peptide 24..119: Von Heijne matrix score 3.85301646018147 seq LAHIQALISGIEA/QL
  polyA_site 407..422
  polyA_signal 384..389
ttgagctgcagtcacagctgagcatgaaagctgccttggaagacacactggcagaaacggaggcgcgctttggagcccagctggcgcatatccaggcgctgatcagcggtattgaagcccagctgggcgatgtgcgagctgatagtgagcggcagaatcaggagtaccagcggctcatggacatcaagtcgcggctggagcaggagattgccacctaccgcagcctgctcgagggacaggaagatcactacaacaatttgtctgcctccaaggtcctctgaggcagcaggctctggggcttctgctgtcctttggagggtgtcttctgggtagagggatgggaaggaagggacccttacccccggctcttctcctgacctgccaataaaaatttatggtccaaggcaaaaaaaaaaaaaaaa

SEQ ID NO: 68 - DNA, 630 bp, Homo sapiens
  CDS 232..534
  sig_peptide 232..306: Von Heijne matrix score 3.78142478107177 seq AKTCLVLCSRVLS/VI
  polyA_site 615..630
  polyA_signal 595..600
tatcactgttacgaaccaaggatttacagatcactggcaaaaattctgagaactttcacaccagtatactgtccaagcccattaagtggcatcacacctctcttttatgtagctcagacaagacagtctaatatcttcaaaatactactgcaatatggaatcttagaaagagaaaaaaaccctatcaacattgtcttaacaatagtactctacccttcgagagtaagagtaatggttgatcgtgaattggctgacatccatgaagatgccaaaacatgtttggtactatgttccagagtgctttctgtcatttcagtcaaggaaataaagacacagctgagtttaggaagacatccaattatttcaaattggtttgattacattccttcaacaagatacaaagatccatgtgaactattacatctttgcagactaaccatcaggaatcaactattaaccaacaatatgctcccagatggaatattttcacttctaattcctgctcgtctacaaaactatctgaatttagaaatctaacatacgtcagtgtcctaagttccttaacaatgcttaccaatgtatggcttagaagttaataaaaattcacttcatgcaaaaaaaaaaaaaaat

SEQ ID NO: 69 - DNA, 730 bp, Homo sapiens
  CDS 80..283
  sig_peptide 80..220: Von Heijne matrix score 3.72491712201476 seq PLLSLHSRGGSSS/ES
  polyA_site 715..730
  polyA_signal 697..702
attttgcgaacggcgagcagcggcggcggcgcggagagacgcagcggaggttttcctggtttcggaccccagcggccggatggtgaaatcctccctgcagcggatcctcaatagccactgcttcgccagagagaaggaaggggataaacccagcgccaccatccacgccagccgcaccatgccgctcctaagcctgcacagccgcggcggcagcagcagtgagagttccagggtctccctccactgctgtagtaacccgggtccggggcctcggtggtgctcctgatgcccctcacccacccctgaagatcccaggtgggcgaggaggaggagtagggccgcctcggggctgggcatccggcccctggggccaccccttgtcagccgggtgggtaggaaccgtagactcgctcatctcgcctgggtttgtccgcatgttgtaatcgtgcaaataaacgctcactccgaattagcggtgtatttcttgaagtttaatattgtgtttgtgatactgaagtatttgctttaattctaaataaaaatttatattttacttttttattgctggtttaagatgattcagattatccttgtactttgaggagaagtttcttatttggagtcttttggaaacagtcttagtcttttaacttggaaagatgaggtattaatcccctccattgctctccaaaagccaataaagtgattacacccaaaaaaaaaaaaaaaa

SEQ ID NO: 70 - DNA, 730 bp, Homo sapiens; identical to SEQ ID NO: 69
  CDS 80..283
  sig_peptide 80..220: Von Heijne matrix score 3.72491712201476 seq PLLSLHSRGGSSS/ES
  polyA_site 715..730
  polyA_signal 697..702

SEQ ID NO: 71 - DNA, 863 bp, Homo sapiens
  CDS 80..283
  sig_peptide 80..220: Von Heijne matrix score 3.72491712201476 PLLSLHSRGGSSS/ES
  polyA_site 844..863
  polyA_signal 827..832
attttgcgaacggcgagcagcggcggcggcgcggagagacgcagcggaggttttcctggtttcggaccccagcggccggatggtgaaatcctccctgcagcggatcctcaatagccactgcttcgccagagagaaggaaggggataaacccagcgccaccatccacgccagccgcaccatgccgctcctaagcctgcacagccgcggcggcagcagcagtgagagttccagggtctccctccactgctgtagtaacccgggtccggggcctcggtggtgctcctgatgcccctcacccacccctgaagatcccaggtgggcgagggaatagtcagagggatcacaatctttcagctaacttattctactccgatgatcggctgaatgtaacagaggaactaacgtccaacgacaagacgaggattctcaacgtctcagcctctacatcgagatcccgggcggcgcgctgcccgaggggagcaaggacagctttgcagttctcctggagttcgctgaggagcagctgcgagccgaccatgtcttcatttgcttccacaagaaccgcgaggacagagccgccttgctccgaaccttcagctttttgggctttgagattgtgagaccggggcatccccttgtccccaagagacccgacgcttgcttcatggcctacacgttcgagagagagtcttcgggagaggaggaggagtagggccgcctcggggctgggcatccggcccctggggccaccccttgtcagccgggtgggtaggaaccgtagactcgctcatctcgcctgggtttgtccgcatgttgtaatcgtgcaaataaacgctcactccgaattaaaaaaaaaaaaaaaa

SEQ ID NO: 72 - DNA, 730 bp, Homo sapiens
  CDS 80..283
  sig_peptide 80..220: Von Heijne matrix score 3.72491712201476 PLLSLHSRGGSSS/ES
  polyA_site 715..730
  polyA_signal 697..702
  Unsure 254..256: Xaa = Asn or Lys
attttgcgaacggcgagcagcggcggcggcgcggagagacgcagcggaggttttcctggtttcggaccccagcggccggatggtgaaatcctccctgcagcggatcctcaatagccactgcttcgccagagagaaggaaggggataaacccagcgccaccatccacgccagccgcaccatgccgctcctaagcctgcacagccgcggcggcagcagcagtgagagttccagggtctccctccaytgytgtagtaasccgggtccggggcctcggtggtgctcctgatgcccctcacccacccctgaagatcccaggtgggcgaggaggaggagtagggccgcctcggggctgggcatccggcccctggggccaccccttgtcagccgggtgggtaggaaccgtagactcgctcatctcgcctgggtttgtccgcatgttgtaatcgtgcaaataaacgctcactccgaattagcggtgtatttcttgaagtttaatattgtgtttgtgatactgaagtatttgctttaattctaaataaaaatttatattttacttttttattgctggtttaagatgattcagattatccttgtactttgaggagaagtttcttatttggagtcttttggaaacagtcttagtcttttaacttggaaagatgaggtattaatcccctccattgctctccaaaagccaataaagtgattacacccaaaaaaaaaaaaaaaa

SEQ ID NO: 73 - DNA, 879 bp, Homo sapiens
  CDS 9..395
  sig_peptide 9..56: Von Heijne matrix score 3.61791418904325 LLLLLRALRRGPG/PG
  polyA_site 864..879
  Unsure 306..308: Xaa = Phe or Tyr
  Unsure 330..332: Xaa = Gln or His
aggccaacatggccgtgctgctgctgctgctccgtgccctccgccggggtccaggcccgggtcctcggccgctgtggggcccaggcccggcctggagtccagggttccccgccaggcccgggagggggcggccgtacatggccagcaggcctccgggggacctcgccgaggctggaggccgagctctgcagagcttacaattgagactgctaacccctacctttgaagggatcaacggattgttgttgaaacaacatttagttcagaatccagtcagactctggcaacttttaggtggtactttctwttttaacacctcaaggttgaagcakaagaataaggagaaggataagtcgaaggggaaggcgcctgaagaggacgaaggtatattcatctgatgttcttcagtcagtagctgcctctggatgtctttacatttctgttttccttttagcaaggtgaaaccagtctggaaaatggggagatgggccgggtgcagtggctcacacttgtaatcgaaacgctttgggaggcccaggtggaaggatcacttgaggcctataccacatagcgagaccctgtctcactgcaaattaaaaggctgggcgtggtggctcacacctgtaatcccagcactttgggaggctgaggcaggcggatcacctgcaccctggccaacatggtgaaaccccgtctttactaaaaatagaaaattagccgggcgtgatggcacacgcctgtaatcccagctactcgggaggctgaggcaggagaattgcttgaacctgggaggtggaggttgctgtgagtggagatcatgccattgcactccagcctgagcaacaagagcaaaactccatctcaaaaaaaaaaaaaaaa

SEQ ID NO: 74 - DNA, 879 bp, Homo sapiens
  CDS 9..395
  sig_peptide 9..56: Von Heijne matrix score 3.61791418904325 LLLLLRALRRGPG/PG
  polyA_site 864..879
aggccaacatggccgtgctgctgctgctgctccgtgccctccgccggggtccaggcccgggtcctcggccgctgtggggcccaggcccggcctggagtccagggttccccgccaggcccgggagggggcggccgtacatggccagcaggcctccgggggacctcgccgaggctggaggccgagctctgcagagcttacaattgagactgctaacccctacctttgaagggatcaacggattgttgttgaaacaacatttagttcagaatccagtcagactctggcaacttttaggtggtactttctattttaacacctcaaggttgaagcagaagaataaggagaaggataagtcgaaggggaaggcgcctgaagaggacgaaggtatattcatctgatgttcttcagtcagtagctgcctctggatgtctttacrtttctgtttwccttttagcaaggtgaaaccagtctggamaatggggagatgggccgggtgcagtggctcacacttgtaatcgaaacgctttgggaggcccaggtggaaggatcacttgaggcctataccacatagctagaccctgtctcactgcaaattaaaaggctgggcgtggtggctcacacctgtaatcccagcactttgggaggctgaggcaggcggatcacctgcaccctggccaacatggtgaaaccccgtctttactaaaaatagaaaattagccgggcgtgatggcacacgcctgtaatcccagctactcgggaggctgaggcaggagaattgcttgaacctgggaggtggaggttgctgtgagtggagatcatgccattgcactccagcctgagcaacaagagcaaaactccatcccaaaaaaaaaaaaaaaa

SEQ ID NO: 75 - DNA, 464 bp, Homo sapiens
  CDS 16..342
  sig_peptide 16..114: Von Heijne matrix score 3.66786754931606 seq LAVFQMLKSMCAG/QR
  polyA_site 446..464
  polyA_signal 412..417
  Unsure 241..243: Xaa = Asn, Asp, Gly, or Ser
gaatgcgcctgcgttatggcggcctccggcgccccaaggatcctggtggacctgctgaagctgaacgtggcccccctcgccgtcttccagatgctcaagtccatgtgtgccgggcagaggctagcgagcgagccccaggaccctgcggccgtgtctctgcccacgtcgagcgtgcccgagacccgagggagaaacaaaggcagcgctgccctcgggggagcattggccctggcggaacgmrrcagccgcgaaggatccagccagaggatgccacgccagcccagcgctaccaggctgcccaaggggggcgggcctgggaagagccctacacggggcagcacctaggatggggcagagacttgttgcatctttgtccccagcaaaggctacatgttacctccttcaattgataataaacctttctgagatgcagagggtccaggtcaaaaaaaaaaaaaaaaaaa

SEQ ID NO: 76 - DNA, 624 bp, Homo sapiens
  CDS 59..367
  sig_peptide 59..166: Von Heijne matrix score 3.66643500261364 seq RALSTFLFGSIRG/AA
  polyA_site 609..624
  polyA_signal 588..593
agtgcgcagacgcaggggtcggcgccgggtgagagcgtgcggccggattcaccacaacatggcaaatctttttataaggaaaatggtgaaccctctgctctatctccgtcgtcacacggtgaagcctcgagccctctccacatttctatttggatccattcgaggtgcagcccccgtggctgtggaacccggggcagcagtgcgctcacttctctcacccggcctcctgccccatctgctgcctgcgctggggttcaaaaacaagactgtccttaagaagcgctgcaaggactgttacctggtgaagaggcggggtcggtggtacgtctactgtaaaacccatccgaggcacaagcagagacagatgtagaccctttccctccagagtcacgcacatactcgtcatcgcatcacttgggagaatggttgtatcttatggaaggaattatcacatcaaggagtcaggggaaagtgactggaagcaaacgccctaaaagttacccatcacgtttcagtgtaaatgagtaactatagaagacattgcgttatcttatttcmaaaacgttccaactaaaaaacattttcctattaaaatagaccttccgaacaaaaaaaaaaaaaaaa

SEQ ID NO: 77 - DNA, 1158 bp, Homo sapiens
  CDS 58..315
  sig_peptide 58..165: Von Heijne matrix score 3.68684848854945 seq SVSLSGFTVGTLS/ET
  polyA_site 1143..1158
ctgtgggagaggccaggatgctgcattaggcacaggataacctgggaacccaggcacatgggtcctgctctccgaagtctgcaagtcaagaagggaacagagcacgccgaccctctccctttcccctctgtctctcttagtggctttacagtgggtaccctgtcagaaaccagcactgggggccctgccacccccacatggaaggagtgtcctatctgtaaggagcgctttcctgctgagagtgacaaggatgccctggaggaccacatggatggacacttctttttcagcacccaggaccccttcacctttgagtgatcttactccctcgtacatgcacaaatacacactcatgcacacacacactcacacacatgcatacacttaggtttcatgcccattttctatcacactgggctccatgatattctgttccctaagaactgcttctgtgtgccctgttttcatcccaagatttctcacttcatcctctcctacctggctcttttgtcccagggaggggtcctgttcggaagcagtggctgaatttatcccctgaaagtggttttggaggaaccgggatggaggaggccttcccctgtgggaatagaatcgtccactcctagccctggttgcttctgatacacagccactgcacacacacactcacactcacactcccttgtytgatgccccaaagccaattcctggggcaccctaccctctcttatttggagtttccgttggtttacctgagttttctctggggtctgcacagaggcagcagcatggacatcatggcctctcaggtcccttttggttctcagtttcattggttcctctttctgttcccccattgacttctgtgccccaccctagccttttccataaccttaggtattcagtttggaggggttttttgtatttttgaggattcctgtattctgtatcctctcctcgcatctcctcacatggaaagaaataatgtatttgtgccttctgtgaggaatggggggaacaagtggtcccaggtatccccatttccaaggcccccctccctctccaggtccccccacagcaataaaagcttccccctgatatccatccctttgtagtttgaacaaatatatttatatgatatgaaaaaaaaaaaaaaaa

SEQ ID NO: 78 - DNA, 641 bp, Homo sapiens
  CDS 187..342
  sig_peptide 187..276: Von Heijne matrix score 3.57432920610252 seq VKLLLKMVSSATT/ER
  polyA_site 626..641
attctaaatcaataaatatagcttacccacagactttttatgggatgtaaagtatgtattacaacaggtaaatccatttctctgttttgggaaagcaggttaatgttttgtttgttttgttgctgcatataatgttgcactatatatatattctaatgcagttggtctcctaattctacaggataaatgtctagctgtggcattgttggatcatcagtttcgtttcagttagatgctgtgaaattgctcttgaaaatggtgtcctctgccaccacagaacggtgttgtaatggaagtgccaattttcataaaaacttgtgtgcaacaggtattaagaatttttgaggtcgggcgcagtagctcacgcctgtaatcccagcactttgggaggcctaggcaggtggatcacctgaggtcaggagttccagaccagcctgaccaacatggtgaaatcccatctccactaaatacaaaaaattagctgggcgtggtggcatacacctgtaatcccagctacttgggaggctaagacaggagaattgcttgaacccaggaggcggaggttgcagtgagccgagattgcaccactacactccagcctgggtgatgagcgaaactccatctcaaaaaaaaaaaaaaaa

SEQ ID NO: 79 - DNA, 660 bp, Homo sapiens
  CDS 2..658
  sig_peptide 2..121: Von Heijne matrix score 6.4143157541603 ITMSATVVDAVNA/AP
  Unsure 5..7: Xaa = Asn or Ile
  Unsure 58..60: Xaa = Gln or Glu
tcctawtcgaaaaattacgagattggcttggattctgtcggatggacttggggctagctgcggcggggctggaggaggccagataaccatgtcagccacagttgtagatgcagttaatgctgcacccctatcggggtccaaagaaatgagtttggaasaaccaaagaagatgaccagagaggactggagaaagaagaaggagctagaagaacagcgaaaattgggcaatgctcctgcagaagttgatgaagaaggaaaagacatcaacccccatattcctcagtatatttcttcagtgccatggtatattgatccttcaaaaagacctactttaaaacaccagagaccacaaccagaaaaacaaaagcagttcagctcatctggagaatggtacaagaggggtgtaaaagagaattccataattactaagtaccgcaaaggagcatgtgaaaattgtggggccatgacacacaaaaagaaagactgctttgagagacctaggcgagttggagccaaatttacaggtactaatatagctccagatgaacatgtccagcctcaactgatgtttgactatgatgggaagagggatcggtggaatggctacaatccagaagaacacatgaaaattgttgaagagtatgccaaagttgatttggc

SEQ ID NO: 80 - DNA, 647 bp, Homo sapiens
  CDS 1..645
  sig_peptide 1..108: Von Heijne matrix score 5.52542399647426 ITMSATVXDAVNA/AP
attacgagattggcttggattctgtckgatggacttggggctagctgcggcggggctggaggaggccagataaccatgtcagccacagttgtmgatgcagttaatgctgcacccctatcggggtccaaagaaatgagtttggaagaaccaaagaagatgaccagagaggactggagaaagaagaaggagctagaagaacagcgaaaattgggcaatgctcctgcagaagttgatgaagaaggaaaagacatcaacccccatattcctcagtatatttcttcagtgccatggtatattgatccttcaaaaagacctactttaaaacaccagagaccacaaccagaaaaacaaaagcagttcagctcatctggagaatggtacaagaggggtgtaaaagagaattccataattactaagtaccgcaaaggagcatgtgaaaattgtggggccatgacacacaaaaagaaagactgctttgagagacctaggcgagttggagccaaatttacaggtactaatatagctccagatgaacatgtccagcctcaactgatgtttgactatgatgggaagagggatcggtggaatggctacaatccagaagaacacatgaaaattgttgaagagtatgccaaagttgatttggc

SEQ ID NO: 81 - DNA, 643 bp, Homo sapiens
  CDS 1..642
  sig_peptide 1..108: Von Heijne matrix score 6.4143157541603 seq ITMSATVVDAVNA/AP
  Unsure 466..468: Xaa = Glu or Lys
attacgagattggcttggattctgtcggatggacttggggctagctgcggcggggctggaggaggccagataaccatgtcagccacagttgtagatgcagttaatgctgcacccctatcggggtccaaagaaatgagtttggaagaaccaaagaagatgaccagagaggactggagaaagaagaaggagctagaagaacagcgaaaattgggcaatgctcctgcagaagttgatgaagaaggaaaagacatcaacccccatattcctcagtatatttcttcagtgccatggtatattgatccttcaaaaagacctactttaaaacaccagagaccacaaccagaaaaacaaaagcagttcagctcatctggagaatggtacaagaggggtgtaaaagagaattccataattactaagtaccgcaaaggagcatgtgaaaattgtggggccatgacacacaaaaagraagactgctttgagagacctaggcgagttggagccaaatttacaggtactaatatagctccagatgaacatgtccagcctcaactgatgtttgactatgatgggaagagggatcggtggaatggctacaatccagaagaacacatgaaaattgttgaagagtatgccaaagttgatt

SEQ ID NO: 82 - DNA, 1200 bp, Homo sapiens
  CDS 29..469
  sig_peptide 29..73: Von Heijne matrix score 4.5958301326157 seq VLVSXCSARLLQQ/EE
  polyA_site 1185..1200
  Unsure 47..49: Xaa = Glu or Lys
acttggcgagtgagacgctgatgggaggatggacgtactggtgtctragtgctccgcgcggctgctgcagcaggaagaagagattaaatctctgactgctgaaattgaccggttgaaaaactgtggctgtttaggagcttctccaaatttggagcagttacaagaagaaaatttaaaattaaagtatcgactgaatattcttcgaaagagtcttcaggcagaaaggaacaaaccaactaaaaatatgattaacattattagccgcctacaagaggtctttggtcatgcaattaaggctgcatatccagatttggaaaatcctcctctgctagtgacaccaagtcagcaggccaagtttggggactatcagtgtaatagtgctatgggtatttctcaggtgatgtattgtcatgactcttggctgtttgatttttttaagtattattatcatcattgccatttacagaaataatactattacaagttgtatccttagtgaaaaggacatttgccacagtttgaaaaacttgagaaaggagttgggggggtatatgttttaacttttttaggcacaatttttaaggtttggttaaattttatatgtattctcaatatttaagggcaatcattggtactcttttgtttaggtatttccctcctgctgtgtccaggaktgctgtgtggtggtratgagtgctgggaggtgaaaaattaaaataagccatttaccagtcagcatcccaattaaatatttgatgtaactgtgatctttgagccaggcttatatattcattttcaagcagaggagttccccattttaaatagaggcattgtctgatgtgtttatggttaactgcatctggcttgggtctttctgttttcctttctttgctgaattggaaggggttactctgaagagtccaggtcttacagtgtggtttatttctcaagtgtgaatattgcacaccttcatggcttgaaaattagaaatgtaaatatgctggaaccagacttcataactgtagactttgttatgtcatcattaaaaagttcgaggtgttgtaatcccagctactagggaggctgaggcaggagaattgcttgaacccaggggcggaggttacagtgagccgagatcacaccactgcactccagcctgggcaacagagcgagactccatctctaaaaaaaaaaaaaaaa

SEQ ID NO: 83 - DNA, 351 bp, Homo sapiens
  CDS 1..351
  sig_peptide 1..129: Von Heijne matrix score 4.10872570449087 LGQVAAAAAAANA/AS
  polyA_site 336..351
  polyA_signal 306..311
ctttctccagctcaagcgtctggtatttggtgtagggacagcgctttttccgggtggagcgagcgtggatccagttcgcggcggggttgtttgggtcaagttgctgctgctgctgcggctgcgaatgctgcttctcctcctccttcagcgaacagcctgggatcgggtggtcgctgcaagctgagggctccgacgagccgcccgtcccagtcgcggccccgatccctgccccaggcccggttccccccgtcgccgctgccgccttctcctgcaggaacgagttgcacatgttactgcttcctactaataaatgctgacctgatcaaatggagcccaaaaaaaaaaaaaaaa

SEQ ID NO: 84 - DNA, 438 bp, Homo sapiens
  CDS 15..278
  sig_peptide 15..122: Von Heijne matrix score 3.79790641648006 seq ILMRDFSPSGIFG/AF
  polyA_site 423..438
  polyA_signal 396..401
accaggactccaaaatggcgtcagttgtaccagtgaaggacaagaaacttctggaggtcaaactgggggagctgccaagctggatcttgatgcgggacttcagtcctagtggcattttcggagcgtttcaaagaggttactaccggtactacaacaagtacatcaatgtgaagaaggggagcatctcggggattaccatggtgctggcatgctacgtgctctttagctactccttttcctacaagcatctcaagcacgagcggctccgcaaataccactgaagaggacacactctgcacccccccaccccacgaccttggcccgagcccctccgtgaggaacacaatctcaatcgttgctgaatcctttcatatcctaataggaattaacctccaaataaaacatgactggtacgtgtgctgaaaaaaaaaaaaaaaa

SEQ ID NO: 85 - DNA, 419 bp, Homo sapiens
  CDS 74..259
  sig_peptide 74..199: Von Heijne matrix score 3.56683458636822 seq CXXSCCSCCPVGC/AK
  polyA_site 404..419
  polyA_signal 388..393
  Unsure 167..169: Xaa = Glu or Lys
cactccgccttccacgtgcacccactgcctcttcccttctcgcttgggaactctagtctcgcctcgggttgcaatggaccccaactgctcctgtgccgctgcaggtgtctcctgcacctgcgccagctcctgcaagtgcaaagagtgcaaatgcacctcctgcaarragagctgctgctcctgctgccctgtgggctgtgccaagtgtgcccagggctgcatctgcaaaggggcatcggagaagtgcagctgctgcgcctgatgtcgggacagccctgctcccaagtacaaatagagtgacccgtaaaatccaggattttttgttttttgctacaatcttgacccctttgctacattcctttttttctgtgaaatatgtgaataataattaaacacttagaccaaaaaaaaaaaaaaaa

SEQ ID NO: 86 - DNA, 396 bp, Homo sapiens
  CDS 1..396
  polyA_site 381..396
  Unsure 352..354: Xaa = Gly or Val
ctcttcccggctccagctccgccgccagctccagcctttgctccmcctcccaaagtcccctccccggagcggagcgcacctagggtccctcttccgtccccccagcccagctacccrttcagaccagcagcctcggggggcacccccccgccagcctgcctccctcccgctcagccctgccagggttccccagccatgaatctcttccgattcctgggagacctctcccacctcctcgccatcatcttgctactgctcaaaatctggaagtcccgctcgtgcgccgcccacccccagcttcctctctccttctgtctgtctgtctgtctgtctgtctctctctctctctctgkctctctctctctctctttctctgtctcaaaaaaaaaaaaaaaa

SEQ ID NO: 87 - DNA, 493 bp, Homo sapiens
  CDS 3..491
aaccccaccgcctaactctcccaactctgcagtccgtgaccttcaggtgcccttcaaggtcagaaaaactcggcaagaatatggtttctagttttagggtttctgaactacaagtattactaggctttgctggacggaataaaagtggacgcaagcatgacctcctgatgagggcgctgcatttattgaagagcggctgcagccctgcggttcagattaaaatccgagaattgtatagacgccgatatccacgaactcttgaaggactttctgatttatccacaatcaaatcatcggttttcagtttggatggtggctcatcacctgtagaacctgacttggccgtggctggaatccactcgttgccttccacttcagttacacctcactcaccatcctctcctgttggttctgtgctgcttcaagatactaagcccacatttgagatgcagcagccatctcccccaattcctcctgtccatcctgatgtgca

SEQ ID NO: 88 - DNA, 500 bp, Homo sapiens
  CDS 3..500
aaccccaccgcctaactctcccaactctgcagtccgtgaccttcaggtgcccttcaaggtcagaaaaactcggcaagaatatggtttctagttttagggtttctgaactacaagtattactaggctttgctggacggaataaaagtggacgcaagcatgacctcctgatgagggcgctgcatttattgaagagcggctgcagccctgcggttcagattaaaatccgagaattgtatagacgccgatatccacgaactcttgaaggactttctgatttatccacaatcaaatcatcggttttcagtttggatggtggctcatcacctgtagaacctgacttggccgtggctggaatccactcgttgccttccacttcagttacacctcactcaccatcctctcctgttggttctgtgctgcttcaagatactaagcccacatttgagatgcagcagccatctcccccaattcctcctgtccatcctgatgtgcagttaaaa

SEQ ID NO: 89 - DNA, 544 bp, Homo sapiens
  CDS 141..494
  polyA_site 529..544
  polyA_signal 508..513
agtctcgcgataactgcgcaggcgcggaccaaagcgatctcttctgaggatccggcaagatggcagaagtatagcagaagaagaagcggaccttccgcaagttcacctaccgcggcgtggacctcgaccagctgctggacatgtcctacgagcagctgatgcagctgtacagtgcgcgccagcggcggcggctgaaccggggcctgcggcggaagcagcactccctgctgaagcgcctgcgcaaggccaagaaggaggcgccgcccatggagaagccggaagtggtgaagacgcacctgcgggacatgatcatcctacccgagatggtgggcagcatggtgggcgtctacaacggcaagaccttcaaccaggtggagatcaagcccgagatgatcggccactacctgggcgagttctccatcacctacaagcccgtaaagcatggccggcccggcatcggggccacccactcctcccgcttcatccctctcaagtaatggctcagctaataaaggcgcacatgactccaaaaaaaaaaaaaaaa

SEQ ID NO: 90 - DNA, 304 bp, Homo sapiens
  CDS 2..304
  Unsure 56..58: Xaa = Ser or Thr
  Unsure 293..295: Xaa = Asn or Ile
acgtacggcagggcggggtcggcccgcagtggccagctgggagctacgagcgcggasttgcgcagaagacccccatcagggtgcggggtgcagttgcggctccagggccatggcggaggagcagggccgggaacgggactcggttcccaagccgtcggtgctgttcctccacccagacctgggcgtgggcggcgctgagcggctggtgctcttgccttttcccactgagagaaggctgctcttttgtactgccccccgctcattaaacagcctccccctaaaaaaaaaaaaaawtgcraaaagc

SEQ ID NO: 91 - DNA, 302 bp, Homo sapiens
  CDS 3..302
  polyA_site 281..302
  polyA_signal 230..235
acgtacggcagggcggggtcggcccgcagtggccagctgggagctacgagcgcggagcttgcgcagaagacccccatcagggtgcggggtgcagttgcggctccagggccatggcggaggagcagggccgggaacgggactcggttcccaagccgtcggtgctgttcctccacccagacctgggcgtgggcggcgctgagcggctggtgctcttgccttttcccactgagagaaggctgctcttttgtactgccccccgctcattaaacagcctccccctaaaaaaaaaaaaaaatgcgaaa

SEQ ID NO: 92 - DNA, 596 bp, Homo sapiens
  CDS 154..594
  Unsure 421..423: Xaa = Ala or Gly
atagtgagcggcagacagaggggtggccagtttgttgttttacctaaaaggtgttttccacatggagtgggactgagaggcacaggtggctgaggggacccgcctgggacgtgaggcgcaggtcctcggccccttcatctgtcagctgcagcaatggaatacgtgctggaagtgaagaactctccgcggcacctcctgaagcaattcacagtgtgtgacgttcctctgtatgacatttgtgactacaacgtctccagagaccgatgccaggagctcgggtgctgcttytacgaaggcgtytgctacaagaaagcggttcccatttacatccacgtgttctctgccttgattgtgatcaaagctggggccttcgtcatcaccatcatctacagagtcattcaggagagcaggaaagaaaaggscatccctgtgtatgtcgcgctgccacagaagtccagcgaaaaggcggagttggcctcatccagcagcaagttagggctgaagcctgcgagtcctgggcctccaagtgctgggccctcgatgaagagtgacgaggataaggatgatgtaacagggacaataacagaagccgaaga

SEQ ID NO: 93 - DNA, 596 bp, Homo sapiens
  CDS 154..594
atagtgagcggcagacagaggggtggccagtttgttgttttacctaaaaggtgttttccacatggagtgggactgagaggcacaggtggctgaggggacccgcctgggacgtgaggcgcaggtcctcggccccttcatctgtcagctgcagcaatggaatacgtgctggaagtgaagaactctccgcggcacctcctgaagcaattcacagtgtgtgacgttcctctgtatgacatttgtgactacaacgtctccagagaccgatgccaggagctcgggtgctgcttctacgaaggcgtctgctacaagaaagcggttcccatttacatccacgtgttctctgccttgattgtgatcatagctggggccttcgtcatcaccatcatctacagagtcattcaggagagcaggaaagaaaaggccatccctgtgtatgtcgcgctgccacagaagtccagcgaaaaggcggagttggcctcatccagcagcaagttagggctgaagcctgcgagtcctgggcctccaagtgctgggccctcgatgaagagtgacgaggataaggatgatgtaacagggacaataacagaagccgaaga

SEQ ID NO: 94 - DNA, 1413 bp, Homo sapiens
  CDS 24..470
  polyA_site 1398..1413
gggttcccgttccccgcggagccatgcggtacaacgagaaggagctgcaggctctgtcccggcagccggccgagatggcggccgagctgggcatgaggggccccaagaagggcagcgtgctgaagcggcggctggtgaagctggtggtgaatttcctcttctactttcggacagacgaggccgagcccgtcggagccctgctgctggagcgctgcagagtcgtccgggaagagcccggcaccttctccatcagcttcattgaggaccctgagaggaagtatcactttgagtgcagcagcgaggagcagtgtcaggagtggatggaggctctgcgtcgggccagctacgagttcatgcggagaagcctcatcttctacaggaacgaaatccggaaggtgacgggcaaggaccccctggaacagttcggcatatccgaggaggccaggttccagctgagtggcttgcaggcgtgagcgcagggcacggtggtcagcgtgcagcgggacgggactggccctgcccagccatgaatcgcttggccatgcctggatctgttttgttttggtttttggtttttgggtcagggtttcactgtgttgcccaggctagagtgcagtggtgccacagctcactgtgaccttgaccttctggactcaagtgatcctcctgcctcagcttcccaagtagcggggatcacaggcatgagtcgccacacccggccatcacacctggattttcagtgggaggtttttggtttggagacatccaaagcctgaagccaggtgggtgtgggcaggggctgcattttatgaaactgcccagcaagctgcgctccctggggccccaggatccacctaactggcttcagcttttgtcatatgggtaaaaattaaagatgtcattgaactactgtcttgtttatgagaccattcagtggtgaactgtttctggctgataggttatgagatatgtaaagctttctagtactcttaaaataactaaatggagtattatatatcaattcatatcattgactttattattttagtagtatgcctatagaaaatattatggactcagagtgtcataaaatcactcttaagaatccatgcagcaggccaggcacagtggctcacacctgtaatgcctgcactttggaaggccgagacaggcggatcacttgaggtcaggagtttgaaaccagccaggccaacacagtgaaaccctgtctctactaaaaatacaaaaggttagccgggcatggtggcaggcgcctgtaatcccagctactcaggaggctgaggcaggagaattgcttgaacgcaggaggcaaaggttgcagtgagctgagatcacgccactgcactccagcctgggcaacagacctcgactccatcaaaaaaaaaaaaaaaa

SEQ ID NO: 95 - DNA, 519 bp, Homo sapiens
  CDS 211..519
  polyA_site 504..519
agattcttaactacgtgtcttacagcaaagttgcccatgggaacaaaggctgtagggtgtcattgatcttgtaatacaacacatatttgatgggtgaatcttattagcactcctttgaaaatgttccagtatggagtcagttgctgataaagaggaagttcacagctaggaatccgaagttaagatttctcaattgccgcctgggcactcatgcctgtagtcccagcacttgggaggccaaggtgggcagatcacctgaggtcgggagttcgggaccagcctggccaacctggtgaagcccccccatctctactaaaaatacaaaaattggccgggtatggtggtggctgcctgtggtcccagctactcgggaggctgaggcgggagaatcacttgagcccgggaggcggaggttgcagtgagccgagattgtgccactgcactccagcctgggtgacagagcaagactccatctcaaaaatagaaaagatttctcaattgccaaaaaaaaaaaaaaaa

SEQ ID NO: 96 - DNA, 347 bp, Homo sapiens
  CDS 73..306
  polyA_site 332..347
  polyA_signal 305..310
actccgccttccacgtgcacccactgcctcttcccttctcgcttgggaactctagtctcgcctcgggttgcaatggaccccaactgctcctgtgccgctggtgtctcctgcacctgcgccagctcctgcaagtgcaaagagtgcaaatgcacctcctgcaagaagagctgctgctcctggtgcactggccccaccctcgtggacacctgccctgccctgccacctgtctgtctgtcccaaagaagttctggtatgaacttgaggacacatgtccagtgggaggtgagaccacctctcaatattcaataaagctgctgagaatctagcctcgaaaaaaaaaaaaaaaa

SEQ ID NO: 97 - DNA, 477 bp, Homo sapiens
  CDS 120..395
  polyA_site 462..477
gcttctttctagtgtggaccagaggtgggggcaatgagtaaacatcttcactgtaagggttttgggactgcccctcagggcttgaggtctcggcatcgtgtctcagtcagtccttggcgatgtcccctcagacgcactcacagacttgcatacgtaatttagtaacatgcatcaactatcctagaacatctacagggtgcaaaggaaccaccactcagagaatcatggagccagtggagttagaagtggaagggacagaacaagacaatgctaaaacctgtggttcactaggaagggggaatgaaaacaccatgctccgaggtggattcagcatgaacacaactgtggggcaaggaatttccaagcaaacacaccacactagtaccacttcttcctaaacagaaaagggaaagagcatccttcgasttccccctccctccatcagcaccgggttttcctccaaaaaaaaaaaaaaaa

SEQ ID NO: 98 - DNA, 363 bp, Homo sapiens
  CDS 117..269
  polyA_site 348..363
  polyA_signal 329..334
cctttctcgttccccggccatcttatcggctgctgttggttgggggccgtcccgctcctaaggcaggaagatggtggccgcaaagaagacggaaatctgaaatagagtactatgctatgttggctaaaactggtgtccatcactacagtggcaataatattgaactgggcacagcatgcggaaaatactacagagtgtgcacactggctatcattgatccaggtgactctgacatcattagaagcatgccagaacagactggtgaaaagtaaaccttttcacctacaaaatttcacctgcaaaccttaaacctgcaaaattttcctttaataaaatttgcttgttctaaaaaaaaaaaaaaaa

SEQ ID NO: 99 - DNA, 606 bp, Homo sapiens
  CDS 115..411
  polyA_site 591..606
  polyA_signal 573..578
aagaaaggggtgaggcctaagggacaatcaggatgtttttcagagagaagtgtggatgctggacaggaagaaccacagataccagatacgggtactgttgtaactctgttctccatgaaaaaaaaggaagaaacaacactttcagagatggagcctgttgagccacagtaccaactagtcaatgctgaatcgacttctccctttctacattgcctgagagaagtcattggggaatactctgtacacgaattttcactgttggggaaaacagagagtcaagggattggattgtggattgcattggtggttttcctcagtttcctcatcttctccacaagtttctacatatcgaatgcagagcagcccttcttcaaagaacctcctacggaagctgctaaggaactcagtctgtagctctgcgtggagccatgtgtaaacactgaactgagacctgccacctcctactacctaagggcccattttcatctgatatcatcccccagaaacaaactcatgatgacttccatgttttttttagattagatacatggagaattttcctttcccttagaattaaaatcctgcattctaaaaaaaaaaaaaaat

SEQ ID NO: 100 - DNA, 648 bp, Homo sapiens
  CDS 125..508
  polyA_site 633..648
  polyA_signal 610..615
agctgcctgggtaaggcccaagatggctgtcttcgccttagtactcgtgtgaagttggcagggacggttcctgtcatcttcttgggcttatttggtgtgctgttgaaggggggagactagagaaatggcagggaacctcttatccggggcaggtaggcgcctgtgggactgggtgcctctggcgtgcagaagcttctctcttggtgtgcctagattgatcggtataaggctcactctcccgccccccaaagtggttgatcgttggaacgagaaaagggccatgttcggagtgtatgacaacatcgggatcctgggaaactttgaaaagcaccccaaagaactgatcagggggcccatatggcttcgaggttggaaagggaatgaattgcaacgttgtatccgaaagaggaaaatggttggaagtagaatgttcgctgatgacctgcacaaccttaataaacgcatccgctatctctacaaacactttaaccgacatgggaagtttcgatagaagagaaagctgagaacttcggaaaaggctcatctgtcaccctggagaagggaaactgtacttttccctgtgaggaaacggctttgtattttctctgtaataaaatggggcttctttggacaaaaaaaaaaaaaaaa

SEQ ID NO: 101 - DNA, 491 bp, Homo sapiens
  CDS 50..205
  polyA_site 469..491
actctttccttggctgctcaggtcataggtgctgtgatctagagacaaaatgttccttacactggcagatacttgcaaactaaggggaatgagcttccttctgaatgtttatgaaggagaggccactgtgtcatctgtcttagagctattggaatcctggatcattgtgggaaatgaaagatacttcgatggaatcagcagccattgatccaatgccaactccaagactggaacgtcgcaatgatagttccaaggcggaaatttgacgtaattcttttcgacacagttttacaggtctggatgcccattttaattcttctgaaagcatgcctcctccttctggcttcaggactccatctccagcctcttgatctaaaaataatccccaaaccaaaaaattagatactatttcctcaaaattaggtattttaatcaaaacatcttaacataaatacattattatcacccaaaaaaaaaaaaaaatgcgaaaa

SEQ ID NO: 102 - DNA, 565 bp, Homo sapiens
  CDS 90..341
  polyA_site 534..565
  polyA_signal 515..520
gttgagggagtcgggccgcgactgtggtcgtttttataccttcccgcgcggacgccggcgctgccaacggaagggcgggctctgctgccatgaaggtgaagattaagtgctggaacggcgtggccacttggctctgggtggccaacgatgagaactgtggcatctgcaggatggcatttaacggatgctgccctgactgcaaggtgcccggcgacgactgcccgctggtgtggggccagtgctcccactgcttccacatgcattgcatcctcaagtggctgcacgcacagcaggtgcagcagcactgccccatgtgccgccaggaatggaagttcaaggagtgaggcccgacctggctctcgctggaggggcatcctgagactccttcctcatgctggcgccgatggctgctggggacagcgcccctgagctgcaacaaggtggaaacaagggctggagctgcgtttgttttgccatcactatgttgacacttttatccaataagtgaaaactcattaaactactcaaatcttaaaaaaaaaaaaaaagaaaaaaaaaaaaaaaa

SEQ ID NO: 103 - DNA, 661 bp, Homo sapiens
  CDS 169..420
  polyA_site 614..661
  polyA_signal 594..599
gagactcggcgggcgctgttgagggagtcggcccgcgactgtggtcgtttttataccttcccgcgcggacgccggcctgccaacggaagggcggagacggagtttcgtcatgttggccaggcccatttgagatctttgaagatatcctcaacgtgaggctctgctgccatgaaggtgaagattaagtgctggaacggcgtggccacttggctctgggtggccaacgatgagaactgtggcatctgcaggatggcatttaacggatgctgccctgactgcaaggtgcccggcgacgactgcccgctggtgtggggccagtgctcccactgcttccacatgcattgcatcctcaagtggctgcacgcacagcaggtgcagcagcactgccccatgtgccgccaggaatggaagttcaaggagtgaggcccgacctggctctcgctggaggggcatcctgagactccttcctcatgctggcgccgatggctgctggggacagcgcccctgagctgcaacaaggtggaaacaagggctggagctgcgtttgttttgccatcactatgttgacacttttatccaataagtgaaaactcattaaactactcaaatcttgaaaaaaaaaaaaaaaaaaaaaaaaaaaaaaagaaaaaaaaaaaaaaaa

SEQ ID NO: 104 - DNA, 609 bp, Homo sapiens
  CDS 144..395
  polyA_site 594..609
  polyA_signal 569..574
gtttttataccttcccgcgcggacgccggcgctgccaacggaagggcgggtagggcggtgcgtgattagagacggagtttcgtcatgttggccaggcccatttgagatctttgaagatatcctcaacgtgaggctctgctgccatgaaggtgaagattaagtgctggaacggcgtggccacttggctctgggtggccaacgatgagaactgtggcatctgcaggatggcatttaacggatgctgccctgactgcaaggtgcccggcgacgactgcccgctggtgtggggccagtgctcccactgcttccacatgcattgcatcctcaagtggctgcacgcacagcaggtgcagcagcactgccccatgtgccgccaggaatggaagttcaaggagtgaggcccgacctggctctcgctggaggggcatcctgagactccttcctcatgctggcgccgatggctgctggggacagcgcccctgagctgcaacaaggtggaaacaagggctggagctgcgtttgttttgccatcactatgttgacacttttatccaataagtgaaaactcattaaactactcaaatcttgaaaagaaaaaaaaaaaaaaaa

SEQ ID NO: 105 - DNA, 635 bp, Homo sapiens
  CDS 177..428
  polyA_site 620..635
  polyA_signal 602..607
aagactcggcgggcgctgttgagggagtcgggccgcgactgtggtcgtttttataccttcccgcgcggacgccggcgctgccaacggaagggcgggtagggcgagacggagtttcgtcatgttggccaggcccatttgagatctttgatatatcctcaacgtgaggctctgctgccatgaaggtgaagattaagtgctggaacggcgtggccacttggctctgggtggccaacgatgagaactgtggcatctgcaggatggcatttaacggatgctgccctgactgcaaggtgcccggcgacgactgcccgctggtgtggggccagtgctcccactgcttccacatgcattgcatcctcaagtggctgcacgcacagcaggtgcagcagcactgccccatgtgccgccaggaatggaagttcaaggagtgaggcccgacctggctctcgctggaggggcatcctgagactccttcctcatgctggcgccgatggctgctggggacagcgcccctgagctgcaacaaggtggaaacaagggctggagctgcgtttgttttgccatcactatgttgacacttttatccaataagtgaaaactcattaaactactcaaatccaaaaaaaaaaaaaaaa

SEQ ID NO: 106 - DNA, 573 bp, Homo sapiens
  CDS 114..365
  polyA_site 558..573
  polyA_signal 539..544
ggcgtgcgagactcggcgggcgctgttgagggagtcgggccgcgactgtggtcgtttttataccttcccgcgcggacgccggcgctgccaacggaagggcgggctctgctgccatgaaggtgaagattaagtgctggaacggcgtggccacttggctctgggtggccaacgatgagaactgtggcatctgcaggatggcatttaacggatgctgccctgactgcaaggtgcccggcgacgactgcccgctggtgtggggccagtgctcccactgcttccacatgcattgcatcctcaagtggctgcacgcacagcaggtgcagcagcactgccccatgtgccgccaggaatggaagttcaaggagtgaggcccgacctggctctcgctggaggggcatcctgagactccttcctcatgctggcgccgatggctgctggggacagcgcccctgagctgcaacaaggtggaaacaagggctggagctgcgtttgttttgccatcactatgttgacacttttatccaataagtgaaaactcattaaactactcaaatcctaaaaaaaaaaaaaaaa

SEQ ID NO: 107 - DNA, 689 bp, Homo sapiens
  CDS 44..283
  polyA_site 674..689
  polyA_signal 644..649
tttcgccgccaaagcatccagcagccccctgctccggcccagcatggcgaccccgacccagacccccacaaaggctcctgaggaacctgacccattttactatgactacaacacggtgcagactgtgggcatgactctggcaaccatcttgttcctgctgggtatcctcatcgtcatcagcaagaaggtgaagtgcaggaaggcggactccaggtctgagagcccaacctgcaaatcctgtaagtctgagcttccctcttcagcccctggtggcggcggcgtgtaacaccttcccgaggaaactccgctgccgaccctgcctgagcgcgggagcctgaggaccgggtggaggcggtggggacccagccgcgcgccgggagcgctccccggaatgagccgccccacccaccccaaggctggagccgctgcaccctgccgtccctctccaggccttggcaatgacgatcccccaaagagcccgtctgcaccccagacccagggcctcaggcctccagctcctgggatccgggagtccatcccggcccagcacccccagcatccccgtgtatggcccccctgcacctccttgtctcatccccgaagatccgtccccctggcccctcagtgtccatgtcttgagcttaataaatgtgcatttggttttttcctctgcaaaaaaaaaaaaaaaa

SEQ ID NO: 108 - DNA, 561 bp, Homo sapiens
  CDS 99..479
  polyA_site 546..561
  polyA_signal 526..531
tttcgaagggaagggagccccctataaaacagcctacagtggacagtctggtcggcagagccgcaggtcagtcgtgaagagggagctctattgccaccatgagtttctccggcaagtaccaactgcagagccaggaaaactttgaagccttcatgaaggcaatcggtctgccggaagagctcatccagaaggggaaggatatcaagggggtgtcggaaatcgtgcagaatgggaagcacttcaagttcaccatcaccgctgggtccaaagtgatccaaaacgaattcacggtgggggaggaatgtgagctggagacaatgacaggggagaaagtcaagacagtggttcagttggaaggtgacaataaactggtgacaactttcaaaaacatcaagtctgtgaccgaactcaacggcgacataatcaccaataccatgacattgggtgacattgtcttcaagagaatcagcaagagaatttaaacaagtctgcatttcatattattttagtgtgtaaaattaatgtaataaagtgaactttgttttaaaaaaaaaaaaaaaa

SEQ ID NO: 109 - DNA, 738 bp, Homo sapiens
  CDS 1..261
  polyA_site 724..738
  polyA_signal 712..717
gacgcagtagccgtggggaagttttcgcaatggccgccggaacggtcgccggccgatgctctctgcgacggaaagaaagccgccggacccacttccggtgcgttttacaatgaactccgggcactcgagtcgctccccggaaactatagttctgcttccaccgttgtcctactttggatagcatcaagacaaaaatctcagtcttcgaggaactcacagtgtagcagaaaagacaaaggaggtaaacaggaggagcatgaataattcatcttgatgtaatcatgcaagactcctaagaagatgttaggagaccctgtcatcattcttttggcctctagtgtcctttatcttcatgtttgctggcttccttttactactatggaaatacaacatatgcaaaagtagtgttttcgctgtttaaaaacatcgtcagcagcatcatcatcattaactgcaccaggaagccatgactcctttctggacaaggtgcacttgcctgtcatccttccatctctttcttcctccttgaagttcacaatacccagtccaggagcattgcagagaatgctaggtgtgtctgcagacttgactttaaaagaaaacaagttccttcaagtgagttcatcatgatgggaatgataatttgtttgagagaatgtgtgttctttggcaaaggaactcctgttataccatgacagtaataatagcagtaataaaatcaccaaaaaaaaaaaaaaa

SEQ ID NO: 110 - DNA, 584 bp, Homo sapiens
  CDS 88..375
  polyA_site 567..584
  polyA_signal 546..551
gagtcagtctcgccagctgccggtctttcgggggctccgtaactttctatccgtccgcgtcagcgcyttgccaccctcatctccaatatgcctggtccgacccccagtggcactaacgtgggatcctcagggcgctctcccagcaaagcagtggccgcccgggcggcgggatccactgtccggcagaggaaaaatgccagctgtgggacaaggagtgcaggccgcacaacctcggcaggcaccggggggatgtggcgattctacacagaagattcacctgggctcaaagttggccctgttccagtattggttatgagtcttctgttcatcgcttctgtatttatgttgcacatttggggcaagtacactcgttcgtagattcagttacatccatctgtcatctgaagaaggaggaaaaaacccaacatttcttggaccaaaagtatagtgactatctgttcatgagagaaattttctgtaagcttgctgttttacaggggatttatcaataattgattttgaggaatcagtttttttctatggctaataaactttttaattcacttataaaaaaaaaaaaaaaa

SEQ ID NO: 111 - DNA, 588 bp, Homo sapiens
  CDS 16..183
  polyA_site 289..588
  polyA_signal 267..272
tttattttgccttctatgtcatcttggagcttaatgtgcatgcaagatatgggaaatactaaagcaagactactctatgaagccaatcttccagagaactttcgaagaccacagacagatcaagcagtggaatttttcatcagagataaatatgaaaagaagaaatactacgaaaaaatgccatagctattacaaatatttcctcctctgatgctcctcttcagcctttggtatcctctccttctctgcaagctgctgttgacaaaaataaattggagaaagaaaaggaaaaaaaaaaggaagagaaaaagagagaaaaggagccagaaaagccggcaaaaccacttacagctgaaaagctgcagaagaaagatcagcaactggagcctaaaaaaagtaccagccctaaaaaagctgcggagccactgtggatcttttaggacttgtttggagaaagattgagaaggaaaagagtgaaaggcagttagttgaagtggaagagttgaccttcatgtactgctttccaaaaaattgatcctagttgttattgaataaattgttgtctgttttaagaaaaaaaaaaaaaaa

SEQ ID NO: 112 - DNA, 589 bp, Homo sapiens
  CDS 16..183
  polyA_site 289..589
  polyA_signal 267..272
tttattttgccttctatgtcatcttggagcttaatgtgcatgcaagatatgggaaatactaaagcaagactactctatgaagccaatcttccagagaactttcgaagaccacagacagatcaagcagtggaatttttcatcagagataaatatgaaaagaagaaatactacgaaaaaatgccatagctattacaaatatttcctcctctgatgctcctcttcagccttttgtatcctctccttctctgcaagctgctgttgacaaaaataaattggagaaagaaaaggaaaaaaaaaaggaagagaaaaagagagaaaaggagccagaaaagccggcaaaaccacttacagctgaaaagctgcagaagaaagatcagcaactggagcctaaaaaaagtaccagccctaaaaaagctgcggagcccactgtggatcttttaggacttgtttggagaaagattgagaaggaaaagagtgaaaggcagttagttgaagtggaagagttgaccttcatgtactgctttccaaaaaattgatcctagttgttattgaataaattgttgtctgttttaagaaaaaaaaaaaaaaa

SEQ ID NO: 113 - DNA, 588 bp, Homo sapiens
  CDS 16..183
  polyA_site 289..588
  polyA_signal 267..272
tttattttgccttctatgtcatcttggagcttaatgtgcatgcaagatatgggaaatactaaagcaagactactctatgaagccaatcttccagagaactttcgaagaccacagacagatcaagcagtggaatttttcatcagagataaatatgaaaagaagaaatactacgaaaaaatgccatagctattacaaatatttcctcctctgatgctcctcttcagcctttggtatcctctccttctctgcaagctgctgttgacaaaaataaattggagaaagaaaaggaaaaaaaaaaggaagagaaaaagagagaaaaggagccagaaaagccggcaaaaccacttacagctgaaaagctgcagaagaaagatcagcaactggagcctaaaaaaagtaccagccctaaaaaagctgcggasccactgtggatcttttaggacttgtttggagaaagattgagaaggaaaagagtgaaaggcagttagttgaagtggaagagttgaccttcatgtactgctttccaaaaaattgatcctagttgttattgaataaattgttgtctgttttaagaaaaaaaaaaaaaaa

SEQ ID NO: 114 - DNA, 590 bp, Homo sapiens
  CDS 16..183
  polyA_site 289..590
  polyA_signal 267..272
tttattttgccttctatgtcatcttggagcttaatgtgcatgcaagatatgggaaatactaaagcaagactactctatgaagccaatcttccagagaactttcgaagaccacagacagatcaagcagtggaatttttcatcagagataaatatgaaaagaagaaatactacgaaaaaatgccatagctattacaaatatttcctcctctgatgctcctcttcagcctttggtatcctctccttctctgcaagctgctgttgacaaaaataaattggagaaagaaaaggaaaaaaaaaaggaagagaaaaagagagaaaaggagccagaaaagccggcaaaaccacttacagctgaaaagctgcagaagaaagatcagcaactggagcctaaaaaaagtaccagccctaaaaaagctgcggagcccactgtggatcttttaggacttgtttggagaaagattgagaaggaaaagagtgaaaggcagttagttgaagtggaagagttgaccttcatgtactgctttccaaaaaattgatcctagttgttattgaataaattgttgtctgttttaagaaaaaaaaaaaaaaat

SEQ ID NO: 115 - DNA, 595 bp, Homo sapiens
  CDS 16..183
  polyA_site 572..595
  polyA_signal 552..557
tttattttgccttctatgtcatcttggagcttaatgtgcatgcaagatatgggaaatactaaagcaagactactctatgaagccaatcttccagagaactttcgaagaccacagacagatcaagcagtggaatttttcatcagagataaatatgaaaagaagaaatactacgaaaaaatgccatagctattacaaatatttcctcctctgatgctcctcttcagcctttggtatcctctccttctctgcaagctgctgttgacaaaaataaattggagaaagaaaaggaaaaaaaaaaggaagagaaaaagagagaaaaggagccagaaaagccggcaaaaccacttacagctgaaaagctgcagaagaaagatcagcaactggagcctaaaaaaagtaccagccctaaaaaagctgcggagcccactgtggatcttttaggacttgtttggagaaagattgagaaggaaaagagtgaaaggcagttagttgaagtggaagagttgaccttcatgtactgctttccaaaaaattgatcctagttgttattgaataaattgttgtctgttttaagaaaaaaaaaaaaaaatgcgaa

SEQ ID NO: 116 - DNA, 588 bp, Homo sapiens; identical to SEQ ID NO: 113
  CDS 16..183
  polyA_site 289..588
  polyA_signal 267..272

SEQ ID NO: 117 - DNA, 588 bp, Homo sapiens; identical to SEQ ID NO: 111
  CDS 16..183
  polyA_site 289..588
  polyA_signal 267..272

SEQ ID NO: 118 - DNA, 588 bp, Homo sapiens; identical to SEQ ID NO: 111
  CDS 16..183
  polyA_site 289..588
  polyA_signal 267..272

SEQ ID NO: 119 - DNA, 595 bp, Homo sapiens
  CDS 16..183
  polyA_site 571..595
  polyA_signal 551..556
tttattttgccttctatgtcatcttggagcttaatgtgcatgcaagatatgggaaatactaaagcaagactactctatgaagccaatcttccagagaactttcgaagaccacagacagatcaagcagtggaatttttcatcagagataaatatgaaaagaagaaatactacgaaaaaatgccatagctattacaaatatttcctcctctgatgctcctcttcagcctttggtatcctctccttctctgcaagctgctgttgacaaaaataaattggagaaagaaaaggaaaaaaaaaaggaagagaaaaagagagaaaaggagccagaaaagccggcaaaaccacttacagctgaaaagctgcagaagaaagatcagcaactggagcctaaaaaaagtaccagccctaaaaaagctgcggagccactgtggatcttttaggacttgtttggagaaagattgagaaggaaaagagtgaaaggcagttagttgaagtggaagagttgaccttcatgtactgctttccaaaaaattgatcctagttgttattgaataaattgttgtctgttttaagaaaaaaaaaaaaaaatgcgaaa

SEQ ID NO: 120 - DNA, 601 bp, Homo sapiens
  CDS 16..183
  polyA_site 572..601
  polyA_signal 552..557
tttattttgccttctatgtcatcttggagcttaatgtgcatgcaagatatgggaaatactaaagcaagactactctatgaagccaatcttccagagaactttcgaagaccacagacagatcaagcagtggaatttttcatcagagataaatatgaaaagaagaaatactacgaaaaaatgccatagctattacaaatatttcctcctctgatgctcctcttcagcctttggtatcctctccttctctgcaagctgctgttgacaaaaataaattggagaaagaaaaggaaaaaaaaaaggaagagaaaaagagagaaaaggagccagaaaagccggcaaaaccacttacagctgaaaagctgcagaagaaagatcagcaactggagcctaaaaaaagtaccagccctaaaaaagctgcggagcccactgtggatcttttaggacttgtttggagaaagattgagaaggaaaagagtgaaaggcagttagttgaagtggaagagttgaccttcatgtactgctttccaaaaaattgatcctagttgttattgaataaattgttgtctgttttaagaaaaaaaaaaaaaaatgcgaaaagctt

SEQ ID NO: 121 - DNA, 589 bp, Homo sapiens
  CDS 16..183
  polyA_site 289..589
  polyA_signal 267..272
tttattttgccttctatgtcatcttggagcttaatgtgcatgcaagatatgggaaatactaaagcaagactactctatgaagccaatcttccagagaactttcgaagaccacagacagatcaagcagtggaatttttcatcagagataaatatgaaaagaagaaatactacgaaaaaatgccatagctattacaaatatttcctcctctgatgctcctcttcagcctttggtatcctctccttctctgcaagctgctgttgacaaaaataaattggagaaagaaaaggaaaaaaaaaaggaagagaaaaagagagaaaaggagccagaaaagccggcaaaaccacttacagctgaaaagctgcagaagaaagatcagcaactggagcctaaaaaaagtaccagccctaaaaaagctgcggagcccactgtggatctttttggacttgtttggagaaagattgagaaggaaaagagtgaaaggcagttagttgaagtggaagagttgaccttcatgtactgctttccaaaaaattgatcctagttgttattgaataaattgttgtctgttttaagaaaaaaaaaaaaaaa

SEQ ID NO: 122 - DNA, 595 bp, Homo sapiens
  CDS 16..183
  polyA_site 571..595
  polyA_signal 551..556
tttattttgccttctatgtcatcttggagcttaatgtgcatgcaagatatgggaaatactaaagcaagactactctatgaagccaatcttccagagaactttcgaagaccacagacagatcaagcagtggaatttttcatcagagataaatatgaaaagaagaaatactacgaaaaaatgccatagctattacaaatatttcctcctctgatgctcctcttcagcctttggtatcctctccttctctgcaagctgctgttgacaaaaataaattggagaaagaaaaggaaaaaaaaaaggaagagaaaaagagagaaaaggagccagaaaagccggcaaaaccacttacagctgaaaagctgcagaagaaagatcagcaactggagcctaaaaaaagtaccagccctaaaaaagctgcggasccactgtggatcttttaggacttgtttggagaaagattgagaaggaaaagagtgaaaggcagttagttgaagtggaagagttgaccttcatgtactgctttccaaaaaattgatcctagttgttattgaataaattgttgtctgttttaagaaaaaaaaaaaaaaatgcgaaa

SEQ ID NO: 123 - DNA, 588 bp, Homo sapiens; identical to SEQ ID NO: 111
  CDS 16..183
  polyA_site 289..588
  polyA_signal 267..272

SEQ ID NO: 124 - DNA, 588 bp, Homo sapiens; identical to SEQ ID NO: 111
  CDS 16..183
  polyA_site 289..588
  polyA_signal 267..272

SEQ ID NO: 125 - DNA, 589 bp, Homo sapiens
  CDS 16..183
  polyA_site 289..589
  polyA_signal 267..272
tttattttgccttctatgtcatcttggagcttaatgtgcatgcaagatatgggaaatactaaagcaagactactctatgaagccaatcttccagagaactttcgaagaccacagacagatcaagcagtggaatttttcatcagagataaatatgaaaagaagaaatactacgaaaaaatgccatagctattacaaatatttcctcctctgatgctcctcttcagcctttggtatcctctccttctctgcaagctgctgttgacaaaaataaattggagaaagaaaaggaaaaaaaaaaggaagagaaaaagagagaaaaggagccagaaaagccggcaaaaccacttacagctgaaaagctgcagaagaaagatcagcaactggagcctaaaaaaagtaccagccctaaaaaagctgcggagcccactgtggatcttttaggacttgtttggagaaagattgagaaggaaaagagtgaaaggcagttagttgaagtggaagagttgaccttcatgtactgctttccaaaaaattgatcctagttgttattgaataaattgttgtctgttttaagaaaaaaaaaaaaaaa

SEQ ID NO: 126 - DNA, 663 bp, Homo sapiens
  CDS 86..451
  polyA_site 622..663
  polyA_signal 597..602
  Unsure 422..424: Xaa = Ala or Asp
acacatccaagcttaagacggtgaggtcagcttcacattctcaggaactctccttctttgggccacggaattaacccgagcaggcatggaggcctctgctctcacctcatcagcagtgaccagtgtggccaaagtggtcagggtggcctctggctctgccgtagttttgcccctggccaggattgctacagttgtgattggaggagttgtggccatggcggctgtgcccatggtgctcagtgccatgggcttcactgcggcgggaatcgcctcgtcctccatagcagccaagatgatgtccgcggcggccattgccaatgggggtggagttgcctcgggcagccttgtggctactctgcagtcactgggagcaactggactctccggattgaccaagttcatcctgggctccattgggtctgmcattgcggctgtcattgcgaggttctactagctccctgcccctcgccctgcagagaagagaaccatgccaggggagaaggcacccagccatcctgacccagcgaggagccaactatcccaaatatacctggggtgaaatataccaaattctgcatctccagaggaaaataagaaataaagatgaattgttgcaactctaaaaaaaaaaaaaaaaaaaaaaaaacaaaaaaaaaaaaaaaa

SEQ ID NO: 127 - DNA, 633 bp, Homo sapiens
  CDS 88..453
  polyA_site 618..633
  polyA_signal 599..604
  Unsure 322..324: Xaa = Arg or Gly
aaacacatccaagcttaagacggtgaggtcagcttcacattctcaggaactctccttctttgggccacggaattaacccgagcaggcatggaggcctctgctctcacctcatcagcagtgaccagtgtggccaaagtggtcagggtggcctctggctctgccgtagttttgcccctggcmaggattgctacagttgtgattggaggagttgtggccatggcggctgtgcccatggtgctcagtgccatgggcttcactgcggcgggaatcgcctcgtcctccatagcagccaagatgatgtccgcggcggccattgccaatsggggtggagttgcctcgggcagccttgtggctactctgcagtcactgggagcaactggactctccggattgaccaagttcatcctgggctccattgggtctgccattgcggctgtcattgcgaggttctactagctccctgcccctcgccctgcagagaagagaaccatgccaggggagaaggcacccagccatcctgacccagcgaggagccaactatcccaaatatacctggggtgaaatataccaaattctgcatctccagaggaaaataagaaataaagatgaattgttacaaaaaaaaaaaaaaaa

SEQ ID NO: 128 - DNA, 588 bp, Homo sapiens
  CDS 15..236
  polyA_site 573..588
  polyA_signal 551..556
gaaaattttccactatggcttccagcactgtcccggtgagcgctgctggctcggctaatgaaactcccgaaataccggacaacgtgggagattggcttcggggcgtctaccgctttgccactgataggaatgacttccggaggaacttgatactaaatttgggactctttgctgcgggagtttggctggccaggaacttgagtgacattgacctcatggcacctcagccaggggtgtagccaagtagacaaatggaatcctgtgctgaacccgaatcttccaaaaaacagcctacaatctgtgaccaccacaagatgtgccctgatggcagctgaagtttgattcagatgggcacttttcttccccttccctgcctagtttccttttgttccttgagtccacgcagaattccattctctggtcagcagacaggcttaagctaaagtattgcctctattctgtaaagttctgtacatagttcccaagcttctgcagggggtgatttttgctcttgtcctgagaaataacagtgctgttttaaaaaacataaaataaataccgcacacaaagacaaaaaaaaaaaaaaaa

SEQ ID NO: 129 - DNA, 608 bp, Homo sapiens
  CDS 39..260
  polyA_site 589..608
  polyA_signal 577..582
acggttcctccaccgaggcccatgcgaagctttccactatggcttccagcactgtcccggtgagcgctgctggctcggctaatgaaactcccgaaataccggacaacgtgggagattggcttcggggcgtctaccgctttgccactgataggaatgacttccggaggaacttgatactaaatttgggactctttgctgcgggagtttggctggccaggaacttgagtgacattgacctcatggcacctcagccaggggtgtagccaagtagacaaatggaatcctgtgctgaacccgaatcttccaaaaaacagcctacaatctgtgaccaccacaagatgtgccctgatggcagctgaagtttgattcagatgggcacttttcttccccttccctgcctagtttccttttgttccttgagtccacgcagaattccattctctggtcagcagacaggcttaagctaaagtattgcctctattctgtaaagttctgtacatagttyccaagcttctgcagggggtgattkttgctcttgtcctgagaaataacagtgctgttttaaaaaacatttgaaataaataccgcacacaaaaaaaaaaaaaaaa

SEQ ID NO: 130 - DNA, 1200 bp, Homo sapiens
  CDS 29..469
  polyA_site 1185..1200
acttggcgagtgagacgctgatgggaggatggacgtactggtgtctgagtgctccgcgcggctgctgcagcaggaagaagagattaaatctctgactgctgaaattgaccggttgaaaaactgtggctgtttaggagcttctccaaatttggagcagttacaagaagaaaatttaaaattaaagtatcgactgaatattcttcgaaagagtcttcaggcagaaaggaacaaaccaactaaaaatatgattaacattattagccgcctacaagaggtctttggtcatgcaattaaggctgcatatccagatttggaaaatcctcctctgctagtgacaccaagtcagcaggccaagtttggggactatcagtgtaatagtgctatgggtatttctcaggtgatgtattgtcatgactcttggctgtttgatttttttaagtattattatcatcattgccatttacagaaataatactattacaagttgtatccttagtgaaaaggacatttgccacagtttgaaaaacttgagaaaggagttgggggggtatatgttttaacttttttaggcacaatttttaaggtttggttaaattttatatgtattctcaatatttaagggcaatcattggtactcttttgtttaggtatttccctcctgctgtgtccaggattgctgtgtggtggtgatgagtgctgggaggtgaaaaattaaaataagccatttaccagtcagcatcccaattaaatatttgatgtaactgtgatctttgagccaggcttatatattcattttcaagcagaggagttccccattttaaatagaggcattgtctgatgtgtttatggttaactgcatctggcttgggtctttctgttttcctttctttgctgaattggaaggggttactctgaagagtccaggtcttacagtgtggtttatttctcaagtgtgaatattgcacaccttcatggcttgaaaattagaaatgtaaatatgctggaaccagacttcataactgtagactttgttatgtcatcattaaaaagttcgaggtgttgtaatcccagctactagggaggctgaggcaggagaattgcttgaacccaggggcggaggttacagtgagccgagatcacaccactgcactccagcctgggcaacagagcgagactccatctctaaaaaaaaaaaaaaaa

SEQ ID NO: 131 - DNA, 646 bp, Homo sapiens
  CDS 50..340
  polyA_site 631..646
  polyA_signal 614..619
gaggagaagaggtgaccccgctaaagataataaatcatcattgatcaagatgtcttcagcacctgagcctccaacattcaaaaaggaaccacccaaagaaaaagagtttcaaagcccagggctcagaggggtgcgcacaacaaccttatttcgtgctgtgaatccagagctcttcattaaacctaacaaacctgtaatggctttcggattggtaactctttcactttgcgtggcatatattggttatctacatgcaatacaagagaataaaaaggacctctatgaagctattgatagtgaggggcacagttatatgaggcggaaaacatccaaatgggattagtagtgctggttagtgcagatggacctttattaaaggttctgaaatcttcaaatgaaagaccttgtgagtgtacagtatcatgtttcttgttctagaacatgctaatgaagagagaagatagcagttgcaaccagacaactgtcgtaaattttgtcctttcacagctgcagccattatctcattctttttccacagagtgagcgtcataatatttttctttccttacctcttataaaagtgccatgagaatggaagttgtttttgttaattattaaattctgtataataaaaaaaaaaaaaaat

SEQ ID NO: 132 - DNA, 575 bp, Homo sapiens
  CDS 177..470
  polyA_site 561..575
  polyA_signal 543..548
  Unsure 264..266: Xaa = Asn or Lys
atcgaccacggaaatttgacacctccgggcttggaagcagctctctcctccttccccgctgcttataaacctcagccctgaggctccagctcactctaccccatctccttgccgggtcagccctgacaaaggtcagctagccccttgaggacatcagctttggcctcagggtcctaatggcagcagaaccactgacagagctagaggagtccattgagaacgtggtcaccaccttcttcacctttgcaaggcaggagggccggaakgatagcctcagcgtcaacgagttcaaagagctggttacccagcagttgccccatctgctcaaggatgtgggctctcttgatgagaagatgaagagcttggatgtgaatcaggactcggagctcaagttcaatgagtactggagattgattggggagctggccaaggaaatcaggaagaagaaagacctkaagatcaggaagaagtaaagccgcctggctgagatggggtgggcagggcagagctgatcagggccgagcagaaccgcactcttcccaaataaagcttcctccttgaaaaaaaaaaaaaaa

SEQ ID NO: 133 - DNA, 458 bp, Homo sapiens
  CDS 75..419
  Unsure 372..374: Xaa = Gly or Ser
  Unsure 381..383: Xaa = Asp or Tyr
ctttcctttctcgttccccggccatcttagcggctgctgttggttgggggccgtcccgctcctaaggcaggaagatggtggccgcaaagaagacgaaaaagtcgctggagtcgatcaaatctaggctccaactcgttatgaaaagtgggaagtacgtcctggggtacaagcagactctgaagatgatcagacaaggcaaagcgaaattggtcattctcgctaacaactgcccagctttgaggaaatctgaaatagagtactatgctatgttggctaaaactggtgtccatcactacagtggcaataatattgaactgggcacagcatgcggaaaatactacagagtgtgcacactggctatcattgatccargtgactctkacatcattagaagcatgccagaacagactggtgaaaagtaaaccttttcacctacaaaatttcacctgcaaacctta

SEQ ID NO: 134 - DNA, 588 bp, Homo sapiens
  CDS 144..449
  polyA_site 573..588
  polyA_signal 552..557
gaggggcgagggggctagcggcgacggctggggcgagcgcgcctgcgcgctgggtgattttttcacgtgtcgccagggccggactgcgagtctctttgcggcgctacactagagcagagtacgagtctgaggcggagggagtaatggcaggacaagcgtttagaaagtttcttccactctttgaccgagtattggttgaaaggagtcctgctgaaactgtaaccaaaggaggcattatgcttccagaaaaatctcaaggaaaagtattgcaagcaacagtagtcgctgttggatcgggttctaaaggaaagggtggagagattcaaccagttagcgtgaaagttggagataaagttcttctcccagaatatggaggcaccaaagtagttytagataacaaggattatttcctatttagagatggtgacattcttggaaagtacgtagactgaaataagtcactattgaaatggcatcaacatgatgctgcccattccactgaagttctgaaatctttcgtcatgtaaataatttccatatttctcttttataataaactaatgataactaacaaaaaaaaaaaaaaaa

SEQ ID NO: 135 - DNA, 538 bp, Homo sapiens
  CDS 93..398
  polyA_site 523..538
  polyA_signal 501..506
gggtgattttttcacgtgtcgccagggccggactgcgagtctctttgcggcgctacactagagcagagtacgagtctgaggcggagggagtaatggcaggacaagcgtttagaaagtttcttccactctttgaccgagtattggttgaaaggagtgctgctgaaactgtaaccaaaggaggcattatgcttccagaaaaatctcaaggaaaagtattgcaagcaacagtagtcgctgttggatcgggttctaaaggaaagggtggagagattcaaccagttagcgtgaaagttggagataaagttcttctcccagaatatggaggcaccaaagtagttctagatgacaaggattatttcctatttagagatggtgacattcttggaaagtacgtagactgaaataagtcactattgaaatggcatcaacatgatgctgcccattccactgaagttctgaaatctttcgtcatgtaaataatttccatatttctcttttataataaactaatgataactaacgaaaaaaaaaaaaaaaa

SEQ ID NO: 136 - DNA, 912 bp, Homo sapiens
  CDS 97..444
  polyA_site 897..912
atctttccgtcccgggcagccagcgccagtcggagccagcgcgagccgccgccgccatcactgccgctgccaagtcctccacccgctgcccccgccatgtctgctaccgctgccacggccccccctgctgccccggctggggagggtggtccccctgcaccccctccaaacctcaccagtaacaggagactgcagcagacccaggcccaggtggatgaggtggtggacatcatgagggtgaacgtggacaaggtcctggagcgagaccagaagctgtcggagctggacgaccgtgcagatgcactccaggcggggccctcccagtttgaaacaagcgcagccaagctcaagcgcaaatactggtggaaaaacctcaagatgatgatcatcttgggagtgatttgcgccatcatcctcatcatcatcatagtttacttcagcacttaaatccccgaggagtctgccctgcctagagaagggcctctcccccaaccctcagccgttcctccacctctcagccatatctttcagccccccctcccctggatccgtgtgtgtgtgtgtccgtgtgtgtgtccccctgtaaatagccagctgttatttatacatatataatattatatatatttggtctgtttgtagttttattactagatgatttttccggttgtccttaacaccccttcctgaggttcccttcacccctctctcttgccttccttccctttccctttcttcctgactagccccaagtcccttcatttgcatctgctatgcaatagtccctctcctttccttcttcttccctcagatttagctgatccttcctcccaccctggccttcctttcctctttcctcctcactctccccgtcatgctccctctgccccgccctcaaaaaaaaaaaaaaaa

SEQ ID NO: 137 - DNA, 562 bp, Homo sapiens
  CDS 45..335
  polyA_site 545..562
  polyA_signal 526..531
tgttattttgtagctttaatgatttttgttttctaatagggcaaatgtctctaagcttggtgtttagagctgcttcatattttaaactagttccattccacagttctagttcaaaccagtttttacagcctcctgggtgggtcgtcttgacccaaactcttgtgttgttacattttgagaggttttcataccagaatgtaccaaaaagtgcacaaggtaaaggtaatttacagccagaaacaaatatacatttgtttcatttcttgactttccctaagcagataagcagaaacttgtttaactcattactttgtttgatgtgtcttacatatttttgactaaaagttatagaatgttattcctctgggggaatcttttacaggtggaggaatggggatagcagtattgcctcagattcaaactggcatcaccataaaccctgtaggccarggtggaatgaagtcagctcctttttatagttgaaatacaattttttattcaccattgtctgcacaaatccttgaaaataaacctttttttccctacaaaaaaaaaaaaaaaa

SEQ ID NO: 138 - DNA, 566 bp, Homo sapiens
  CDS 32..361
  polyA_site 551..566
  polyA_signal 532..537
aacttgctctgcccgctcaaacagttgcaggatgtcgatgacagacttgctgaacgctgaggacatcaagaaggcggtgggagcctttagcgctaccgactccttcgaccacaaaaagttcttccaaatggtcggcctgaagaaaaagagtgcggatgatgtgaagaaggtgtttcacatgctggacaaggacaaaagtggcttcatcgaggaggatgagctgggattcatcctaaaaggcttctccccagatgccagagacctgtctgctaaagaaaccaagatgctgatggctgctggagacaaagatggggacggcaaaattggggttgacgaattctccactctggtggctgaaagctaagaagcactgactgcccctggtcttccacctctctgccctcaacacccaatctcggcccctcttgccaccctcctgcatttctgttcagttcgtttatgttattttttactcccccatcccctgtggccctctaatgacaccattcttctggaaaatgctggagaagcaataaaggttgtaccagtcaaaaaaaaaaaaaaaa

SEQ ID NO: 139 - DNA, 567 bp, Homo sapiens
  CDS 31..360
  polyA_site 552..567
  polyA_signal 531..536
acttgctctgcccgctcaaacagttgcaggatgtcgatgacagacttgctgaacgctgaggacatcaagaaggcggtgggagcctttagcgctaccgactccttcgaccacaaaaagttcttccaaatggtcggcctgaagaaaaagagtgcggatgatgtgaagaaggtgtttcacatgctggacaaggacaaaagtggcttcatcgaggaggatgagctgggattcatcctaaaaggcttctccccagatgccagagacctgtctgctaaagaaaccaagatgctgatggctgctggagacaaagatggggacggcaaaattggggttgacgaattctccactctggtggctgaaagctaagaagcactgactgcccctggtcttccacctctctgccctgaacacccaatctcggcccctctcgccaccctcctgcatttctgttcagttcgtttatgttattttttactcccccatcccctgtggccctctaatgacaccattcttctggaaaatgctggagaagcaataaaggttgtaccagtcacaaaaaaaaaaaaaaaa

SEQ ID NO: 140 - DNA, 566 bp, Homo sapiens; identical to SEQ ID NO: 138
  CDS 32..361
  polyA_site 551..566
  polyA_signal 532..537

SEQ ID NO: 141 - DNA, 625 bp, Homo sapiens
  CDS 85..420
  polyA_site 610..625
  Unsure 106..108: Xaa = Asp or Glu
  Unsure 181..183: Xaa = Asp or Glu
cccttctgcgcggtcacgccgagccagcgcctgggcctggaaccgggccgtagcccccccagtttcgcccaccacctccctaccatggacccccgcaaagtgaacgakcttcgggcctttgtgaaaatgtgtaagcaggatccgagcgttctgcacaccgaggaaatgcgcttcctgagggastgggtggagagcatgggtggtaaagtaccacctgctactcaaaaagctaaatcagaagaaaataccaaggaagaaaaacctgatagtaagaaggtggaggaagacttaaaggcagacgaaccatcaagtgaggaaagtgatctagaaattgataaagaaggtgtgattgaaccagacactgatgctcctcaagaaatgggagatgaaaatgcggagataacggctcaacattttttgtagccacaggcttccacggacttcacgtcattattggctcaactttcctcactatctgcttcatccgccaactaatatttcactttacatccaaacatcactttggcttcgaagccgccgcctgatactggcattttgtagatgtggtttgactatttctgtatgtctccatctattgatgagggtcttaaaaaaaaaaaaaaat

SEQ ID NO: 142 - DNA, 685 bp, Homo sapiens
  CDS 22..375
  polyA_site 670..685
  polyA_signal 650..655
agtcgagccagcgtcgccgcgatggtgttgttggagagcgagcagttcctgacggagctgaccagacttttccagaagtgccggacgtcgggcagcgtctatatcaccttgaagaagtatgacggtcgaaccaaacccattccaaagaaaggtactgtggagggctttgagcccgcagacaacaagtgtctgttaagagctaccgatgggaagaagaagatcagcactgtggtgagctccaaggaagtgaataagtttcagatggcttattcaaacctccttagagctaacatggatgggttgaagaagagagacaaaaagaacgaaactaagaagaccaaagcagcagcagcagcagcagcaacagcagcacagtaaagggcatacatttcctgctttcaccaattaaccactgaattgctattttttccttttggccagatagctaggtttctggttcccccacagtaggtgttttcacataagattagggtccttttggaaagaatagttgcagtgtttataggatagttgtggtaagaatctagtttattttgcatttggctaattggtctgtgctgcatggttatatactcctggattatagattaaaagtctctgtagacatctctgtgaagagcaagctatcattaaacatgtctgtttatcaaaaaaaaaaaaaaaa

SEQ ID NO: 143 - DNA, 553 bp, Homo sapiens
  CDS 9..335
  polyA_site 538..553
  polyA_signal 520..525
tcaagaatatggatagtttaccttctggtaaaatacatcgaaaagtgaaaataatattaggacgaaatagaaaagaaaatctggaaccaaatgctgaatttgataaaagaactgaatttattacacaagaagaaaacagaatttgtagttcaccggtacagtctttactagacttgtttcagactagtgaagagaaatcagaatttttgggtttcacaagctacacagaaaagagtggtatatgcaatgttttagatatttgggaagaggaaaattcagataatctgttaacagcgtttttctcgtccccttcaacttctacatttactggcttttagaatttaaaaaatgcatacttttcagaagtgataaggatcatattcttgaaatttttataaatatgtatggaaattcttaggatttttttaccagctttgtttacagacccaaatgtaaatattaaaaataaatatttgcaattttctacagaattgaatacctgttaaagaaaaattacagaataaacttgtgactggtaaaaaaaaaaaaaaat

SEQ ID NO: 144 - DNA, 631 bp, Homo sapiens
  CDS 156..464
  polyA_site 610..631
  polyA_signal 559..564
  Unsure 450..452: Xaa = Arg or Thr
  Unsure 462..464: Xaa = Asn or His
aattcatatctgagtgggcggtggcgattggtgttggcggtctggctcagctgggcagggggtaactttactgatttgggggtggtttttagtttaatttttcttttctagcttcccatcgacggtcagtgcgcacgttgtaatcagctgaggccatgtcaggagacggagccacggagcaggcagctgagtatgtcccagagaaggtgaagaaagcggaaaagaaattagaagagaatccatatgaccttgatgcttggagcattctcattcgagaggcacagaatcaacctatagacaaagcacggaagacttatgaacgccttgttgcccagttccccagttctggcagattctggaaactgtacattgaagcagaggttactattttattttattttttcttatatcagtattgcagcattcactgtagtgatagaaaacaagttasgaacatagccmattaggacaaggaggatttaaatgtgtcttacctttattttgtaaaataggtataaaggagtaattaaaatgaatttttgaaatttgggtcttttacaagctgatgattgttgcattttggagttgcaacaacattaaaacagtttcaatgataaaaaaaaaaaaaaaa

SEQ ID NO: 145 - DNA, 635 bp, Homo sapiens
  CDS 160..375
  polyA_site 620..635
  polyA_signal 569..574
ttttaattcatatctgagtgggcggtggcgattggtgttggcggtctggctcagctgggcagggggtaactttactgatttgggggtggtttttagtttaatttttcttttctagcttcccatcgacggtcagtgcgcacgttgtaatcagctgaggccatgtcaggagacggagccacggagcaggcagctgagtatgtctcagagaaggtgaagaaagcggaaaagaaattagaagagaatccatatgaccttgatgcttggagcattctcattcgagaggcacagaatcaacctatagacaaagcacggaagacttatgaacgccttgttgcccagttccccagttctggcagattctggaaactgtacatttaagcagaggttactattttattttattttttcttatatcagtattgcagcattcactgtagtgatagaaaamaagttasgaacatagccaattaggacaaggaggatttaaatttgtcttacctttattttgtaaaataggtataaaggagtaattaaaatgaatttttgaaatttgggtcttttacaagctgatgattgttgcattttggagttgcaacaacattaaaacagtttcaatggcaaaaaaaaaaaaaaaa

SEQ ID NO: 146 - DNA, 733 bp, Homo sapiens
  CDS 32..349
  polyA_site 718..733
  polyA_signal 711..716
actaactagcaaacggggactagaaatagggatgctgaaaagcaacggggagagacgcagtcgtaacgcacttccggcggtctacgcgaggaagatggctgcatcccagcagcaagcttcagcggcttcctcagctgctggtgtatcgggtcctagttcggctggcggcccgggtccccagcagcagccgcaaccgccagcacaactggtgggccctgcccagagcggcctcctgcagcaacagcaacaggacttcgatcctgtgcagcgttataagatgctcatcccgcagctgaaggagagtctacaggtgattggccttaagcagcgagaagcaaactggatttggtagtctagaggggcaggccgrgggccaggttagtcggagagagcgctaagcagaaagaggaatagaacctgctgttttggcctggctggtgcacgcctgtgttcccagcactttgggaggccgaggcgggcggatcacttgaggtcaggagttcaagaccagcctggtgaaacctcgtctctactaaaaatacaaaaattagccgggcatggtggcgcgcgcctgtaattacagctactcgggaagctgaggcaggagaatcgcttgaacccaggaggcggaggttgcagtgagccgacatcgtgccattgcactccagcctgggcaacagagcgagctccgtcaawaaaataaataaataaataaataaaaaaaaaaaaaaaa

SEQ ID NO: 147 - DNA, 521 bp, Homo sapiens
  CDS 111..368
  polyA_site 506..521
  polyA_signal 483..488
tctcagcttccggctggtagtagttccgcttcctgtccgactgtggtgtctttgctgagggtcacattgagctgcaggttgaatccggggtgcctttaggattcagcaccatggcggaagacatggagaccaaaatcaagaactacaagaccgccccttttgacagccgcttccccaaccagaaccagactagaaactgctggcagaactacctggacttccaccgctgtcagaaggcaatgaccgctaaaggaggcgatatctctgtgtgcgaatggtaccagcgtgtgtaccagtccctctgccccacatcctgggtcacagactgggatgagcaacgggctgaaggcacgtttcccgggaagatytgaactggctgcatctccctttcctctgtcctccatccttctcccaggatggtgaagggggacctggtacccagtgatccccaccccaggatcctaaatcatgacttacctgctaataaaaactcattggaaaagtcaaaaaaaaaaaaaaaa

SEQ ID NO: 148 - DNA, 547 bp, Homo sapiens
  CDS 95..409
  polyA_site 533..547
  polyA_signal 509..514
ttcgaagtggttgtctctgcactatttactgaaaagttcatcctttccccagtgatttgtaacactgcctctttcataaattaaatttttgtgtatgtgtgtgggtcttttgatggtttctattctgactgacatcaatttgtctaatcttgtagcagtacagtacagtcctgattattgcaactttaggaaaaggtctgataaaaaccaagatgcctccacattttgtcataattgtaaccaatttcacctctgtctccagtatcaccacaaaattgttcttccttggagtgtcttggctattcttagccaactgttcctccatattacttctagaattagaccaacaatttataaatcaaacaaacccaagagcattgaaattttgattggatttgtattgaatttatagattaatctggtaaaccatgtcatctttacaatgttgtcttccaatacatgaatatggtacagctcttcatttacttaggcctttgaaatatctttcaataaagtttataattttctccataaaaaaaaaaaaaaa

SEQ ID NO: 149 - DNA, 3159 bp, Homo sapiens
  CDS 103..405
acttccggtgcgaaccgcctcggccgttccctcgcggacttactgagcgcggccgccgagcccagctccgccgccgagcgcctgtgccggcacggctacaccatggagcgcccggataaggcggcgctgaacgcactgcagcctcctgagttcagaaatgaaagctcattagcatctacactgaagacgctcctgttcttcacagctttaatgatcactgttcctattgggttatatttcacaactaaatcttacatatttgaaggcgcccttgggatgtccaatagggacagctatttttacgctgctattgttgcagtggtcgccgtccatgtggtgctggccctctttgtgtatgtggcctggaatgaaggctcacgacagtggcgtgaaggcaaacaggattaaagtgaacatcacctttttatagcattaaattcattttttaaaatgataaatgctggagggggccatctgatttgaataaagttgaaagaacatgttaaagtcagtcttaaggagtcacgtttgagtatgtaaattttgatctttctaatatgttggtttgtatattcagttttaactgtatgaatctgatttgcaaatgagaatttggaaaagttagttacaaagaaatatgttaatttaattagacaatactctggaaggaattttatcttctttcaacaaaacatgttttatagtattctgacttacggttgcttttgagttttactcatktggatatattaagatgcacacagtgaagcaaattaaactccactttacgctggaatgctttctttagcatgaaaataccaggtccttggatttgggattttaatttcctatggaaagttgcttaaattgtggacactggaattaatctgaatgtcactgaggaatttcacatgaagtgtaatccctagtcaataagaattatccattacattattttatgggaaaactaggctaaattacatccattcaggtaaaaggaccttagcttactgaaggatctaaagagcaaagcaaagatctcactactcaaacactcagcctgcttccttcaagtccccttgcaggccagctttgtgctttgcagaccaactttttaatgagatactttgcttcctcattcaacattgaagctaggcttcaattaaaaggttcgaggaagctccatttaaaattgtttttttactattttttaaaattgtagtgtatatgataggaatttgcatttaaatatgttcatttttgcatatgttaggagtggaaacaatctggaaaacatttttttttcatccaaaaagtattctccttgggcatatctgatggaaaaaaaccttgattttattttcgtatctttagtctgtgttctttctagttatttggtactaattatgtgcaatctaaaaacactcccacaagtatttgttttttaattataaaatcatagtatatgttctttgtagaaaactggaaaaatacatattcaaacagaaaaaaaaatcaaaattccccataatgttgccatctaaaaataacctctattttagttgatatcccgtattcatttttgaaagccattccttaatgctagtttgatacacactaaaagtttagcttacaagttcaaattctgccagcttttcctgacagctatttgcatttttttcagatgagtgattattggccattttctttttctttttctttattttatttatttatttttttgagacagagttttgctctgttgcccaggctggagtgcagtggtgcaatctcggctcactgcaacctctgcctcctgggttcaagtgattctccacctcagcctcccaagtagctgggactacggatgcctgccaccacgcctggctaatttttttttgtatttttttgtagagacggggtttcaccatgttgtccaggctaatcttgaacttgtgacctcaggtgatccacccgcctcggcctccgaaagtgctgggattacaggcgtgagctaccacgcccggccttattgaccattttctaaataagcacattctatctttattctcttaaaattcaaattttctgttactgataatcctaatactaggattcttgcttaagtatgtgaaaccattaccgatttgttgttcacatttattttttatgttgtgaaactggactaaaggaatagagggatgattagtcataaaagtcaaatagcatttgtgtttaactgttgagaaaagtgaaagatcagtatgattattatggaactgtttttaattcttgcttaaagactacaattttagtataatgacatttgagtctagggtagtatgtggtagatttctagatggtccctaattaagaagtattgttgtatttagaattgtccacctaatttctttttatataatgccaaggtatttcttgtgcttttgggatcttatgctgtttgtaaaatgttactgtccaatgttggattattgttttggtttcaggcatttgctgaataggtgatgatacatgggtatttttctgcaagtatttaaaccaggggcatatgcaaaggcagttgtaatttcctcttggaaaaagcgccaaatgtttgaaggttaaaatcaaatgctagggttgatatttaggcttataacaaaataggcttgttttcaaagcagttttttcctagagttttaactgttaactcactagtttgctgctgtttttaactatgttaaataacatatggtatttggcaaatagatttatttttcaaaatgtctcactagtttccttttacacaatgtatatacttcaagatgtatagaaaggaaagctacagttgagcccttatacatgttttaaggtagaaatatgttccctattgtttgaaaactgattgtaagaataacctcagttaggagatataacttgaagtgtcagtccaaactactgatttaaccctatttacggtaacacattaccttcctcacctcctgtttggccctggagaatgtagtcctttttctcatttgtgttgagaaatgaaaagtctgctgtagaatgtatctgatgtcattagttcttcaaatggataccattgtacatataacagtagaatttggtttggggttgttagtgaaaaaaaattta

SEQ ID NO: 150 - DNA, 1033 bp, Homo sapiens
  CDS 30..305
  Unsure 111..113: Xaa = Arg, Asn, Lys, or Ser
  Unsure 114..116: Xaa = Arg or Gly
agaatgtcgtactctcaggaggctccaccatgttcagggatttcggacgccgactgcagagggatttgaagagagtggtggatgctaggctgaggctcagcgaggagctcarssgcgggaggatcaagccgaagcctgtggaggtccaggtggtcacgcatcacatgcagcgctacgccgtgtggttcggaggctccatgctggcctcgactcccgagttctttcaggtctgccacaccaagaaggactatgaagagtacgggcccagcatctgccgccacaaccccgtctttggagtcatgtcctagtgtctgcctgaacgcgtcgttcgatggtgtcacgttggggaacaagtgtccttcagaacccagagaaggccgccgttctgtaaatagcgacgtcggtgttgctgcccagcagcgtgcttgcattgccggtgcatgaggcgcggcgcgggcccttcagtaaaagccatttatccgtgtgccgaccgctgtctgccagcctcctccttctcccgccctcctcaccctcgctctccctcctcctcctcctccgagctgctagctgacaaatacaattctgaaggaatccaaatgtgactttgaaaattgttagagaaaacaacattagaaaatggcgcaaaatcgttaggtcccaggagagaatgtgggggcgcaaacccttttcctcccagcctatttttgtaaataaaatgtttaaacttgaaatacaaatcgatgtttatatttcctatcattttgtattttatggtatttggtacaactggctgatactaagcacgaatagatattgatgttatggagtgctgtaatccaaagtttttaattgtgaggcatgttctgatatgtttataggcaaacaaataaaacagcaaacttttttgccacatgtttgctagaaaatgattatactttattggagtgacatgaagtttgaacactaaacagtaatgtatgagaattactacagatacatgtatcttttagttttttttgtttgaactttctgg

SEQ ID NO: 151 - DNA, 1033 bp, Homo sapiens
  CDS 30..305
agaatgtcgtactctcaggaggctccaccatgttcagggatttcggacgccgactgcagagggatttgaagagagtggtggatgctaggctgaggctcagcgaggagctcagcggcgggaggatcaagccgaagcctgtggaggtccaggtggtcacgcatcacatgcagcgctacgccgtgtggttcggaggctccatgctggcctcgactcccgagttctttcaggtctgccacaccaagaaggactatgaagagtacgggcccagcatctgccgccacaaccccgtctttggagtcatgtcctagtgtctgcctgaacgcgtcgttcgatggtgtcacgttggggaacaagtgtccttcagaacccagagaaggccgccgttctgtaaatagcgacgtcggtgttgctgcccagcagcgtgcttgcattgccggtgcatgaggcgcggcgcgggcccttcagtaaaagccatttatccgtgtgccgaccgctgtctgccagcctcctccttctcccgccctcctcaccctcgctctccctcctcctcctcctccgagctgctagctgacaaatacaattctgaaggaatccaaatgtgactttgaaaattgttagagaaaacaacattagaaaatggcgcaaaatcgttaggtcccaggagagaatgtgggggcgcaaacccttttcctcccagcctatttttgtaaataaaatgtttaaacttgaaatacaaatcgatgtttatatttcctatcattttgtattttatggtatttggtacaactggctgatactaagcacgaatagatattgatgttatggagtgctgtaatccaaagtttttaattgtgaggcatgttctgatatgtttataggcaaacaaataaaacagcaaacttttttgccacatgtttgctagaaaatgattatactttattggagtgacatgaagtttgaacactaaacagtaatgtatgagaattactacagatacatgtatcttttagttttttttgtttgaactttctgg

SEQ ID NO: 152 - DNA, 688 bp, Homo sapiens
  CDS 159..452
  polyA_site 678..688
  polyA_signal 670..675
atacgtacaccaatgcggacaagctcctagaagcagcagagcagttggctcagacgggggaatgtgaccccgaggagatctacaaggcagctcgacacctggaggtgcgcatccaagacttcgtgcgcagggtggagcagcggaagcttctcctggacatgtctgtttccttccacacacacaccaaagagttgtggacatggatggaagaccttcagaaggagatgttggaggatgtctgtgcagattctgtggatgcagtccaggaactgatcaagcagttccagcagcagcagaccgccactctagatgccacactcaatgtcatcaaggaaggcgaagaccttatccagcagctcaggtcagcgcctccctccctcggggagcccagcgaggccaggtcagcatgggcagagctttccagtgggaaatgcctcgggctagacgtgagataagtcctgtcccagtcttgactcagcaaaatcttgctttgtggtcttgtgtgagcttcggtttctttatctgtaagatgtaaaaatgcctgcaccatactcaacttgaatctagaataaaatagtaaatggaaaagctttaatgtttcaaagaattatttatcattcaggatgttattcagccatcagtaagtaacataaatacaacaaaaattaacataaaacaaaaaaaaaaa

SEQ ID NO: 153 - DNA, 420 bp, Homo sapiens
  CDS 63..329
  polyA_site 406..420
atgctcgccaggataccccctcttcccatggcgacctcagaccgcgggcgtcagcgttggcgatggtctccggagacggcttcctcgtttccaggcctgaagcgattcatctaggacctcggcaggcggtgcgaccaagcgttcgggccgagagccgtcgagtggatggtggcggccggagcccaagggaaccagatggccggggccggagccgccaagcgagattctcaccttacccaatccctgccgttgaacccgatctcctaagaagtgtgctgcaacagcgtttgattgcattaggaggtgttatcgcagctcgaatttcagtttaaacgaacacctttcctctggccctcacttagcttgtgaacaggcctttttaaaatcctttcttggtgtagcagcaaaaaaaaaaaaaaa

SEQ ID NO: 154 - DNA, 640 bp, Homo sapiens
  CDS 181..549
  polyA_site 626..640
atgctcgccagaatacccctcgttaaaggcaaggcggcttctggctcttccgcaggctcagttatgggttcctgtgtgcttagtcatcgggtccgacacaggctggactgatctggggagccgcgaagggcctgccttcacaaagggacgtaacgcaagtattgcgggcagtgtttgaatatggccctgaacaatgtgtccctgtcctccggtgatcagaggagcagggtggcctaccgctcttcccatggcgacctcagaccgcgggcgtcagcgttggcgatggtctccggagacggcttcctcgtttccaggcctgaagcgattcatctaggacctcggcaggcggtgcgaccaagcgttcgggccgagagccgtcgagtggatggtggcggccggagcccaagggaaccagatggccggggccggagccgccaagccagattctcaccttacccaatccctgccgttgaacccgatctcctaagaagtgtgctgcaacagcgtttgattgcattaggaggtgttatcgcagctcgaatttcagtttaaacgaacacctttcctctggccctcacttagcttgtgaacaggcctttttaaaatcctttcttggtgtagcagcaaaaaaaaaaaaaaa

SEQ ID NO: 155 - DNA, 1582 bp, Homo sapiens
  CDS 8..523
  polyA_site 1567..1582
agtcaagatggcgggagcagctacccaggcttccctggagtcggccccacggatcatgcggctggtggccgaatgcagccgctccagggcccgggcaggcgagctgtggctgccgcatgggacagtggccactcctgtgttcatgccagtgggcacgcaggccaccatgaagggcatcacgaccgaacagctggacgctctgggttgccgcatctgcctgggcaatacctaccatctgggtctaaggccgggacccgagctgatccagaaagccaacggtctccacggcttcatgaattggcctcataatctgctaacggacagcggcggtttccagatggtgtcgctggtgtctctgtccgaggtgacggaggagggcgtccgcttccgctccccctacgacggcaatgagaccctgctgagcccggagaaatccgtgcagatccagaatgcgctgggctcggacatcatcatgcagctggacgacgtggttagcagtactgtgactgggccacgtgtggagtaggccatgtacaggtcaatccgctggctggaccggtgcattgcagcccatcagcggccggacaagcagaacctcttcgccattatccagggtgggctggacgcagatctccgggccacctgccttgaagagatgaccaagcgagacgtgcctggcttcgccatcgggggcctgagcgggggtgagagcaagtcgcagttctggcggatggtggcgctgagcacctctcggctgccgaaggacaagccccgatatctgatgggggttgggtatgttgtggatagggaagccagagccctacctgtgggaagtggattcctggggaccccctaccctgcttggggaggtggcatttgggggaaacggacacaggtctgatctgaggagactaggaagacatggctgtcccttgggggccattctgagggaatatggcccagtctggggcagtgtgagtgttgggaggggccctgggaagcccctgaggttctctgccccctcccgtcatggctgcaaccccagctatgccactgatctggtagtctgcgtggctcttggatgtgacatgttcgactgcgtcttccccacacggacagcgcgctttggctctgccctggtgcccactgggaacctgcagttgaggaagaaggtgtttgagaaggacttcggccccatagacccggagtgcacctgccccacgtgccaaaagcacagccgcgccttcctgcacgcactgctgcacagtgacaacacggccgcgctgcaccacctcacggtccacaacatcgcctaccagctgcagctcatgagcgccgtccgcaccagcatcgtggagaagcgcttcccggacttcgtgcgggacttcatgggcgccatgtacggggatcccaccctctgtcccacctgggccactgacgctctggcctctgtgggaatcacactgggctgacctggcattgggagagggagggaggaaggaagggagggaggggctggaagatactgaaggattcctttttgaaaggttttttttattgtaacttaaaaaaaaaaaaaaaa

SEQ ID NO: 156 - DNA, 104 bp, Homo sapiens
  CDS 45..104
agagctgagctgaagcgggacccggagcccgagcagccgccgccatggcaatcaaatttctggaagtcatcaagcccttctgtgtcatcctgcaactaacatct

SEQ ID NO: 157 - DNA, 150 bp, Homo sapiens
  CDS 2..70
  polyA_site 135..150
  polyA_signal 115..120
ttttctcaacaattcctcaccgcaggagcctctgaagctcccaccaggccagctctcctccacccaccgctaactctcagccccagtcaccctcttggagcttccctgctttgaattaaagaccactcatgcgcaaaaaaaaaaaaaaaa

SEQ ID NO: 158 - DNA, 510 bp, Homo sapiens
  CDS 150..284
  polyA_site 495..510
  polyA_signal 475..480
  Unsure 228..230: Xaa =  Phe or Ser
aaccaaagcatgggctctttgtttcctctttgccaggcctgggtccttcccagtgacccctcagccttcacttcctcctcactcccggggagctgtgacaggaagaggagatcccagaactggagattgacgtggatgagctcctggacatggagagtgacgatgcccgggctgccagggtcaaggagctgctggttgactgttacaaacccacagaggccttcatttytggcctgctggacaagatccggggcatgcagaagctgagcacaccccagaagaagtgagggtccccgacccaggagaacggtggctcccacaggacaatcgctgccccccaacctcgtagcaacagcaataccgggggaccctgcggccaggcctggtgccatgagcagggctcctcgtgcccctggcccaggggtctcttcccctgccccctcagttttccacttttggggtttttttattgttattaaactgatgggacttctaaaaaaaaaaaaaaaa

SEQ ID NO: 159 - DNA, 390 bp, Homo sapiens
  CDS 10..336
  polyA_site 373..390
  polyA_signal 354..359
agtctgaagatggcggcctcagcagcgcgaggtgctgcggcgctgcgtagaagtatcaatcagccggttgcttttgtgagaagaattccttggactgcggcgtcgagtcagctgaaagaacactttgcacagttcggccatgtcagaaggtgcattttaccttttgacaaggagactggctttcacagaggtttgggttgggttcagttttcttcagaagaaggacttcggaatgcactacaacaggaaaatcatattatagatggagtaaaggtccaggttcacactagaaggccaaaacttccgcaaacatctgatgatgaaaagaaagatttttgagactgcagcctattaataaagttaacataactgacaaaaaaaaaaaaaaaa

SEQ ID NO: 160 - DNA, 398 bp, Homo sapiens
  CDS 23..175
  polyA_site 383..398
  polyA_signal 365..370
gagaaggtgctttagtctgaagatggcggcctcagcagcgcgaggtgctgcggcgctgcataagtatcaatcagccggttgcttttgtgagaagaattccttggactgcggcgtcgagtcagctgaaagaacactttgcacagttcggccatgtcagaaggtgcattttaccttttgacaaggagactggctttcacagaggtttgggttgggttcagttttcttcagaagaaggacttcggaatgcactacaacaggaaaatcatattatagatggagtaaaggtccaggttcacactagaaggccaaaacttccgcaaacatctgatgatgaaaagaaagatttttgagactgcagcctattaataaagttaacataaccaaaaaaaaaaaaaaaa

SEQ ID NO: 161 - DNA, 425 bp, Homo sapiens
  CDS 2..118
  polyA_site 394..425
cccagtcagagggctgaacatgtccgagtttgtctgtaacctgtcagcaaggccttatgtgtacgacctcattgccgtgtccaatcattatggagccatgggggttggccactactaaagcagcttatgtgctattttaccaacgtcgagatgatgaattttataagacaccttcacttagcagttctggttcctctgatggagggacacgaccaagcagctctcagcagggctttggggatgatgaggcttgcagcatggacaccaactaatgctgactccacgatcctgccaccctgtagcgccagtgtaatcccccaggagaacatctttgacactctgcagactgctagtgttctgtctaaaaaccagacaaggaaatacccttcttttatgagcagaaggaawcaaaaaaaaaaaaaaaa

SEQ ID NO: 162 - DNA, 438 bp, Homo sapiens
  CDS 3..41
  polyA_site 419..438
agatgttaggctttgccaaaaactggatctttagtatcacttgagcactcattggacacaagaggtcaactgttttgtcatttgtgtagtaagaacaaaataaagtgtgtggcattaaagaaataacactgtctggccgggatcggtggctcacgcctgtaatcccagcactttgggaggccgaggcgggcagatcacgaggtcaggagttcgagaccagcctgaccaacatgatgaaaccctgtctctactaaaaatacaaaaattagccaggcatggtggtgcacacctgtagtcccagctgctcaggaggctgaggcaggagaatcgctcgaacccgggaggtggaggttgcagtgagctgagatggcgccactgcattccaggcctggggggtgacagagcaagactcagtctcagaaaaaaaaaaaaaaaaag

SEQ ID NO: 163 - DNA, 436 bp, Homo sapiens
  CDS 3..41
  polyA_site 419..436
agatgttaggctttgccaaaaactggatctttagtatcacttgagcactcattggacacaagaggtcaactgttttgtcatttgtgtagtaagaacaaaataaagtgtgtggcattaaagaaataacactgtctggccgggatcggtggctcacgcctgtaatcccagcactttgggaggccgaggcgggcagatcacgaggtcaggagttcgagaccagcctgaccaacatgatgaaaccctgtctctactaaaaatacaaaaattagccaggcatggtggtgcacacctgtagtcccagctgctcaggaggctgaggcaggagaatcgctcgaacccgggaggtggaggttgcagtgagctgagatggcgccactgcattccaggcctggggggtgacagagcaagactcagtctcagaaaaaaaaaaaaaaaa

SEQ ID NO: 164 - DNA, 436 bp, Homo sapiens; identical to SEQ ID NO: 163
  CDS 3..41
  polyA_site 419..436

SEQ ID NO: 165 - DNA, 436 bp, Homo sapiens; identical to SEQ ID NO: 163
  CDS 3..41
  polyA_site 419..436

SEQ ID NO: 166 - DNA, 436 bp, Homo sapiens; identical to SEQ ID NO: 163
  CDS 3..41
  polyA_site 421..436

SEQ ID NO: 167 - DNA, 436 bp, Homo sapiens
  CDS 3..41
  polyA_site 419..436
agatgttaggctttgccaaaaactggatctttagtatcacttgagcactcattggacacaagaggtcaactgttttgtcatttgtgtagtaagaacaaaattaagtgtgtggcattaaagaaataacactgtctggccgggatcggtggctcacgcctgtaatcccagcactttgggaggccgaggcgggcagatcacgaggtcaggagttcgagaccagcctgaccaacatgatgaaaccctgtctctactaaaaatacaaaaattagccaggcatggtggtgcacacctgtagtcccagctgctcaggaggctgaggcaggagaatcgctcgaacccgggaggtggaggttgcagtgagctgagatggcgccactgcattccaggcctggggggtgacagagcaagactcagtctcagaaaaaaaaaaaaaaaa

SEQ ID NO: 168 - DNA, 394 bp, Homo sapiens
  CDS 10..336
  polyA_site 373..394
  polyA_signal 354..359
agtctgaagatggcggcctcagcagcgcgaggtgctgcggcgctgcgtagaagtatcaatcagccggttgcttttgtgagaagaatwccttggactgcggcgtcgagtcagctgaaagaacactttgcacagttcggccatgtcagaaggtgcattttaccttttgacaaggagactggctttcacagaggtttgggttgggttcagttttcttcagaagaaggacttcggaatgcactacaacaggaaaatcatattatagatggagtaaaggtccaggttcacactagaaggccaaaacttccgcaaacatctgatgatgaaaagaaagatttttgagactgcagcctattaataaagttaacataactgaaaaaaaaaaaaaaaaggtcaa

SEQ ID NO: 169 - DNA, 772 bp, Homo sapiens
  CDS 595..771
atataggcgtggctgaatacgggcctcctgcgtacgtgcgtggtgtacgtacgtgcgtgattacgcgcacacgtacgttcctcatgaaagggacgacgggagctgcatgaaagccgaagttatggaccgctagcatctgtcactggccaccggtttccgggagtaagcggcagctaccttacagccctgacacgagccgggtgctctctcttctcaccgcggcccacgtctcctcgctggctccggtggcctcgctgggtcgcgaggaggcggaggactgtactctgaggccaaaagccagagtcggccctgaacgcccacgactctcagggtccagaggccgtgagaccggccgcggctgaaaggtaaagaaaccaagtggaagagtgtttcctcctctggccgtaaagcaggtactctctgcagcaccagctgtccccgccctactccggaccgccccaaagactccatgggatggacctgagtcagccgaatcctagccccttcccttgggcctgctgtggtgctcgacatcagtgacagacggaagcagcagaccatcaaggctacgggaggcccggggcgcttgcgaagatgaagtttggctgcctctccttccggcagccttatgctggctttgtcttaaatggaatcaagactgtggagacgcgctggcgtcctctgytgagcagccagcggaactgtaccatcgccgtccacattgctcacagggactgggaaggcgatgcctgtcgggagctgctggtggaga

SEQ ID NO: 170 - protein, 128 aa, Homo sapiens
  SIGNAL -34..-1
  UNSURE 7: Xaa = Ile or Thr
MSLRLDTTPSCNSARPLHALQVLLLLSLLLTALASSTKGQXKRNLAKGKDESLDSDLYAELRCMCIKTTSGIHPKNIQSLEVIGKGTHCNQVEVIATLKDGRKICLDPDAPRIKKIVQKKLAGDESAD

SEQ ID NO: 171 - protein, 160 aa, Homo sapiens
  SIGNAL -18..-1
MKAAVLTLAVLFLTGSQARHFWQQDEPPQSPWDRVKDLATVYVDVLKDSGRDYVSQFEGSALGKQLNLKLLDNWDSVTSAFSNLREQLGPVTQEFWDNLEKETEGLRQEMSKDLEEVKAKVQPYLDDFQKKWQEEMELYRQKAAFLTILTSLGPNGNKAF

SEQ ID NO: 172 - protein, 80 aa, Homo sapiens
  SIGNAL -26..-1
  UNSURE 52: Xaa = Leu or Pro
MGRAMVARLGLGLLLLALLLPTQIYSSETTTGTSSNSSQSTSNSGLAPNPTNATTKVAGGALQSTASLFVVSLSLLHXYS

SEQ ID NO: 173 - protein, 101 aa, Homo sapiens
  SIGNAL -27..-1: Von Heijne matrix score 11.8486806626293 seq LFLGLLLLPLVVA/FA
MSSAAGFCASRPGLLFLGLLLLPLVVAFASAEAEEDGDLQCLCVKTTSQVRPRHITSLEVIKAGPHCPTAQLIATLKNGRKICLDLQAPLYKKIIKKLLES

SEQ ID NO: 174 - protein, 101 aa, Homo sapiens; identical to SEQ ID NO: 173
  SIGNAL -27..-1: Von Heijne matrix score 11.8486806626293 seq LFLGLLLLPLVVA/FA

SEQ ID NO: 175 - protein, 86 aa, Homo sapiens
  SIGNAL -18..-1
MIPAVVLLLLLLVEQAAALGEPQLCYILDAILFLYGIVLTLLYCRLKIQVRKAAITSYEKSDGVYTGLSTRNQETYETLKHEKPPQ

SEQ ID NO: 176 - protein, 92 aa, Homo sapiens
  SIGNAL -24..-1
  UNSURE 52: Xaa = Arg or Thr
MVMGLGVLLLVFVLGLGLTPPTLAQDNSRYTHFLTQHYDAKPQGRDDRYCESIMRRRGLTSPCKDINTFIHGNKRXSRPSVKTRMETLTEKT

SEQ ID NO: 177 - protein, 111 aa, Homo sapiens
  SIGNAL -16..-1
MLLILLSVALLAFSSAQDLDEDVSQEDVPLVISDGGDSEQFIDEERQGPPLGGQQSQPSAGDGNQNDGPQQGPPQQGGQQQQGPPPPQGKPQGPPPQGGRPQGPPQGQSPQ

SEQ ID NO: 178 - protein, 106 aa, Homo sapiens
  SIGNAL -16..-1
MLLILLSVALLAFSSAQDLDEDVSQEDVPLVISDGGDSEQFIDEERQGPPLGGQQSQPSAGDGNQDDGPQQGPPQQGGQQQQGPPPPQGKPQGPPQQGGQSCCCDK

SEQ ID NO: 179 - protein, 141 aa, Homo sapiens
  SIGNAL -24..-1
MPSSVSWGILLLAGLCCLVPVSLAEDPQGDAAQKTDTSHHDQDHPTFNKITPNLAEFAFSLYRQLAHQSNSTNIFFSPVSIATAFAMLSLGTKADTHDEILEGLNFNLTEIPEAQIHEGFQELLRTLNQPDSQLQLTTGKN

SEQ ID NO: 180 - protein, 124 aa, Homo sapiens
  SIGNAL -30..-1
MPACRLGPLAAALLLSLLLFGFTLVSGTGAEKTGVCPELQADQNCTQECVSDSECADNLKCCSAGCATFCSLPNDKEGSCPQVNINFPQLGLCRDQCQVDSQCPGQMKCCRNGCGKVSCVTPNF

SEQ ID NO: 181 - protein, 124 aa, Homo sapiens
  SIGNAL -30..-1
MPACRLGPLAAALLLSLLLFGFTLVSGTGAEKTGVCPELQADQNCTQECVSDSECADNIKCCSAGCATFCSLPNDKEGSCPQVNINFPQLGLCRDQCQVDSQCPGQMKCCRNGCGKVSCVTPNF

SEQ ID NO: 182 - protein, 69 aa, Homo sapiens
  SIGNAL -17..-1: Von Heijne matrix score 9.5148977432302 seq FVFLLFVISLAAA/AH
MFPGFVFLLFVISLAAAAHLWVLAAFMGRITVKVCSFTPEASKTVSPPEGANNSRRTAFKSCNTHHKGL

SEQ ID NO: 183 - protein, 77 aa, Homo sapiens
  SIGNAL -33..-1
  UNSURE 6: Xaa = Lys or Met
MGPVKQLKRMFEPTRLIATIMVLLSFALTLCSAFWWHNXGLALIFCILQSLALTWYSLSFIPFARDAVKKCFAVCLA

SEQ ID NO: 184 - protein, 146 aa, Homo sapiens
  SIGNAL -26..-1
MTMRSLLRTPFLCGLLWAFCAPGARAEEPAASFSQPGSMGLDKNTVHDQEHIMEHLEGVINKPEAEMSPQELQLHYFKMHDYDGNNLLDGLELSTAITHVHKEEGSEQAPLMSEDELINIIDGVLRDDDKNNDGYIDYAEFAKSLQ

SEQ ID NO: 185 - protein, 62 aa, Homo sapiens
  SIGNAL -46..-1: Von Heijne matrix score 8.64329745298384 seq AVLLLILFAIVFG/LL
MDQLVFKETIWNDAFWQNPWDQGGLAVIILFITAVLLLILFAIVFGLLTSTENTQCEAGEEE

SEQ ID NO: 186 - protein, 62 aa, Homo sapiens; identical to SEQ ID NO: 185
  SIGNAL -46..-1: Von Heijne matrix score 8.64329745298384 seq AVLLLILFAIVFG/LL

SEQ ID NO: 187 - protein, 162 aa, Homo sapiens
  SIGNAL -47..-1
MRIANRTRFSSPFLARGAGWTHGRGMMVVGTGTSLALSSLRSLLLFAGMQMYSRQLASTEWLTIQGGLLGSGLFVFSLTAFNNLENLVFGKGFQAKIFPEILLCLLLALFASGLIHRVCVTTCFIFSMVGLYYINKISSTLYQAAAPVLTPAKVTGKSKKRN

SEQ ID NO: 188 - protein, 90 aa, Homo sapiens
  SIGNAL -35..-1
METGASASIPELICEAMRRIWSLGLGLVTLTASWAALFHDGFAVLGGNIVSDLSTVRFVAQQQHFQLLDVWTRNFRKPLGSMCFVFLLLP

SEQ ID NO: 189 - protein, 146 aa, Homo sapiens
  SIGNAL -25..-1
  UNSURE 60: Xaa = Arg or Lys
MRLLQLLFRASPATLLLVLCLQLGANKAQDNTRKIIIKNFDIPKSVRPNDEVTAVLAVQTELKECMVVKTYLISSIPLQGAFNYXYTACLCDDNPKTFYWDFYTNRTVQIAAVVDVIRELGICPDDAAVIPIKNNRFYTIEILKVE

SEQ ID NO: 190 - protein, 120 aa, Homo sapiens
  SIGNAL -32..-1: Von Heijne matrix score 7.64815044221151 seq VTLGIGFFALASA/LW
MASPKGFFNYLTYFLAAGAVTLGIGFFALASALWFLICKRREIFQNSKFKAIDERCRQRPSMAKIKSHSQCVFISRNFHTGRFQLQQLKIILKMNPNLQQKISFVIPQRPAPQQIAAVLH

SEQ ID NO: 191 - protein, 78 aa, Homo sapiens
  SIGNAL -19..-1
MKFFVFALVLALMISMISADSHEKRHHGYRRKFHEKHHSYHITLLPLFEESSKSNANEKHYNLLYTLCFRILAFSIVT

SEQ ID NO: 192 - protein, 87 aa, Homo sapiens
  SIGNAL -20..-1: Von Heijne matrix score 7.42708462116258 seq LLVFLAGFPVLDA/ND
MQKVTLGLLVFLAGFPVLDANDLEDKNSPFYYDWHSLQVGGLICAGVLCAMGIIIVMSAKCKCKFGQKSGHHPGETPPLITPGSAQS

SEQ ID NO: 193 - protein, 105 aa, Homo sapiens
  SIGNAL -19..-1: Von Heijne matrix score 7.20796835452081 seq VSIMLLLVTVSDC/AV
  unsure 37: Xaa = Glu or *
MRGATRVSIMLLLVTVSDCAVITGACERDVQCGAGTCCAISLWLRGLRMCTPLGRXGEECHPGSHKIPFFRKRKHHTCPCLPNLLCSRFPDGRYRCSMDLKNINF

SEQ ID NO: 194 - protein, 105 aa, Homo sapiens [sequence omitted]

SEQ ID NO: 195 - protein, 102 aa, Homo sapiens
  SIGNAL -36..-1
  UNSURE 21: Xaa = Ile or Met
  UNSURE 52: Xaa = Ile or Ser
MSNTTVPNAPQANSDSMVGYVLGPFFLITLVGVVVAVVMYVQKKKRVDRLRHHLLPXYSYDPAEELHEAEQQLLSDMGDPKVVHGWQXGYQHKRMPLLDVKT

SEQ ID NO: 196 - protein, 137 aa, Homo sapiens
  SIGNAL -18..-1
MKALIVLGLVLLSVTVQGKVFERCELARTLKRLGMDGYRGISLANWMCLAKWESGYNTRATNYNAGDRSTDYGIFQINSRYWCNDGKTPGAVNACHLSCSGWHGEIVVKTEMSVSMFKVVECNSRIFLLQLILSLSH

SEQ ID NO: 197 - protein, 101 aa, Homo sapiens [sequence omitted]

SEQ ID NO: 198 - protein, 128 aa, Homo sapiens
  SIGNAL -26..-1
  UNSURE 49: Xaa = Glu or Lys
MCWLRAWGQILLPVFLSLFLIQLLISFSENGFIHSPRNNQKPRDGNEEECAVKKSCQLCTEDKKCVWCSEEKACXKYCFPYFGCRFSSIYWLNCKVDMFGIMMLLLIAVLITGFVWYCCAYHFYLQDI

SEQ ID NO: 199 - protein, 142 aa, Homo sapiens
  SIGNAL -24..-1
  UNSURE 79: Xaa = Asn or Lys
  UNSURE 80: Xaa = Arg, Leu, or Trp
  UNSURE 90: Xaa = Asp or Glu
MRLSWFRVLTVLSICLSAVATATGAEGKRKLQIGVKKRVDHCPIKSRKGDVLHMHYTGKLEDGTEFDSSLPQNQPFVFSLGTGQVIKGWDQGLLGMCEGEKRXXVIPSELGYGXRGAPPKIPGGATLVFEVELLKIERRTEL

SEQ ID NO: 200 - protein, 70 aa, Homo sapiens [sequence omitted]

SEQ ID NO: 201 - protein, 113 aa, Homo sapiens
  SIGNAL -23..-1
  UNSURE 8: Xaa = Asn, Gln, His, or Lys
MAGPAAAFRRLGALSGAAALGFASYGAHGAXFPDAYGKELFDKANKHHFLHSLALLGVPHCRKPLWAGLLLASGTTLFCTSFYYQALSGDPSIQTLAPAGGTLLLLGWLALAL

SEQ ID NO: 202 - protein, 113 aa, Homo sapiens; identical to SEQ ID NO: 201
  SIGNAL -23..-1
  UNSURE 8: Xaa = Gln or Lys

SEQ ID NO: 203 - protein, 54 aa, Homo sapiens
  SIGNAL -17..-1: Von Heijne matrix score 6.48133858229514 seq LTFAQLLFATVLG/IA
MFRRLTFAQLLFATVLGIAGGVYIFQPVFEQYAKDQKELKEKMQLVQESEEKKS

SEQ ID NO: 204 - protein, 83 aa, Homo sapiens
  SIGNAL -15..-1
MRLFLSLPVLVVVLSIVLEGPAPAQGTPDVSSALDKLKEFGNTLEDKARELISRIKQSELSAKMREWFSETFQKVKDKLKIDS

SEQ ID NO: 205 - protein, 98 aa, Homo sapiens
  SIGNAL -43..-1
MFRIEGLAPKLDPEEMKRKMREDVISSIRNFLIYVALLRVSECLPGCDCDTSGELTDGHPLTLRGHRGLRTELNGSGEQGGSIYLKEIGQHMKTGHHI

SEQ ID NO: 206 - protein, 82 aa, Homo sapiens
  SIGNAL -43..-1: Von Heijne matrix score 5.65876793443964 seq VVSFALIATLVYA/LF
MAKYQGEVQSLKLDDDSVIEGVSDQVLVAVVVSFALIATLVYALFRNVHQNIHPENQELVRVLREQLQTEQDAPADSTAVLH

SEQ ID NO: 207 - protein, 82 aa, Homo sapiens; identical to SEQ ID NO: 206
  SIGNAL -43..-1

SEQ ID NO: 208 - protein, 82 aa, Homo sapiens
  SIGNAL -43..-1
  UNSURE 32: Xaa = Ala or Gly
MAKYQGEVQSLKLDDDSVIEGVSDQVLVAVVVSFALIATLVYALFRNVHQNIHPENQELVRVLREQLQTEQDAPXDSTAVLH

SEQ ID NO: 209 - protein, 82 aa, Homo sapiens; identical to SEQ ID NO: 206
  SIGNAL -43..-1

SEQ ID NO: 210 - protein, 99 aa, Homo sapiens
  SIGNAL -28..-1
  UNSURE 2: Xaa = Phe or Ser
  UNSURE 16: Xaa = Phe or Ser
MTSALTQGLERIPDQLGYLVLSEGAVLASXGDLENDEQAASAIXELVSTACGFRLHRGMNVPFKRLSVVFGEHTLLVTVSGQRVFVVKRQNRGREPIDV

SEQ ID NO: 211 - protein, 99 aa, Homo sapiens
  SIGNAL -28..-1
  UNSURE 16: Xaa = Phe or Ser
MTSALTQGLERIPDQLGYLVLSEGAVLASSGDLENDEQAASAIXELVSTACGFRLHRGMNVPFKRLSVVFGEHTLLVTVSGQRVFVVKRQNRGREPIDV

SEQ ID NO: 212 - protein, 186 aa, Homo sapiens
  SIGNAL -15..-1
  UNSURE 11: Xaa = Cys or Trp
  UNSURE 37: Xaa = Cys or Gly
  UNSURE 149: Xaa = Arg or Gly
MHVMAASMARGGVSARVLLQAARGTXWNRPGGTSGSGEGVALGTTRKFQATXSRPAGEEDAGGPERPGDVVNVVFVDRSGQRIPVSGRVGDNVLHLAQRHGVDLEGACEASLACSTCHVYVSEDHLDLLPPPEEREDDMLDMAPLLQENSRLGCQIVLTPELEXAEFTLPKITRNFYVDGHVPKPH

SEQ ID NO: 213 - protein, 123 aa, Homo sapiens
  SIGNAL -48..-1
  UNSURE 75: Xaa = Ala or Asp
MEALGKLKQFDAYPKTLEDFRVKTCGGATVTIVSGLLMLLLFLSELQYYLTTEVHPELYVDKSRGDKLKINIDVLFPHMPCAYLSIDAMDVAGEQQLDVEHNLFKQRLDKDGIPVSSEAERHX

SEQ ID NO: 214 - protein, 77 aa, Homo sapiens
  SIGNAL -29..-1
MAATDFVQEMRAVGERLLLKLQRLPQAEPVEIVAFSVIILFTATVLLLLLIACSCCCTHCCCPERRGRKVQVQPTPP

SEQ ID NO: 215 - protein, 107 aa, Homo sapiens
  SIGNAL -27..-1
MLFEEALPLSCSDPVLSTLSLVQFSPSGRTQDLLSPGVENLSVLDVSPLGLACCLLTLTMSCPGPDPPEGPGTQRVWQGALRILQLPGAPDGVSPYQPVWSRTPDLK

SEQ ID NO: 216 - protein, 112 aa, Homo sapiens
  SIGNAL -39..-1
MLEHLSSLPTQMDYKGQKLAEQMFQGIILFSAIVGFIYGYVAEQFGWTVYIVMAGFAFSCLLTLPPWPIYRRHPLKWLPVQAQTTRNQGKEKLRGMLKIIEVFMIQHLLLFL

SEQ ID NO: 217 - protein, 71 aa, Homo sapiens
  SIGNAL -23..-1: Von Heijne matrix score 5.918755252201 seq SALMLLPCRPVLT/SV
MMNNGLLQQPSALMLLPCRPVLTSVALNANFVSWKSRTKYTITPVKMRKSGGRDHTGAGNVRSNSRPSIQR

SEQ ID NO: 218 - protein, 71 aa, Homo sapiens; identical to SEQ ID NO: 217
  SIGNAL -23..-1: Von Heijne matrix score 5.918755252201 seq SALMLLPCRPVLT/SV

SEQ ID NO: 219 - protein, 92 aa, Homo sapiens [sequence omitted]

SEQ ID NO: 220 - protein, 92 aa, Homo sapiens
  SIGNAL -15..-1
  UNSURE 56: Xaa = Asn or Ser
MAVLAGSLLGPTSRSAALLGGRWLQPRAWLGFPDAWGLPTPQQARGKARGNEYQPSNIKRKNKHGWVRRLXTPAGVQVILRRMLKGRKSLSH

SEQ ID NO: 221 - protein, 92 aa, Homo sapiens
  SIGNAL -15..-1
  UNSURE 56: Xaa = Asn or Ser
  UNSURE 62: Xaa = Arg, Gln, or Lys
MAVLAGSLLGPTSRSAALLGGRWLQPRAWLGFPDAWGLPTPQQARGKARGNEYQPSNIKRKNKHGWVRRLXTPAGVXVILRRMLKGRKSLSH

SEQ ID NO: 222 - protein, 92 aa, Homo sapiens
  SIGNAL -15..-1
  UNSURE -6: Xaa = Asp or Gly
  UNSURE 6: Xaa = Gly or Ser
  UNSURE 56: Xaa = Asn or Ser
  UNSURE 61: Xaa =  * , Glu, Leu, or Val
  UNSURE 62: Xaa =  Ala, Gln, Glu, Pro
  UNSURE 63: Xaa = Phe or Val
MAVLAGSLLXPTSRSAALLGXRWLQPRAWLGFPDAWGLPTPQQARGKARGNEYQPSNIKRKNKHGWVRRLXTPAGXXXILRRMLKGRKSLSH

SEQ ID NO: 223 - protein, 87 aa, Homo sapiens
  SIGNAL -39..-1
MKVLLLTGLGALFFAYYWDDNFDPASLQGARVLLTGANAGVGEELAYHYARLGSHLVLTAHTEALLQKARWLTLVVSTLGGRGKWIT

SEQ ID NO: 224 - protein, 125 aa, Homo sapiens
  SIGNAL -15..-1
  UNSURE 30: Xaa = Ile or Met
  UNSURE 100: Xaa = Asn or Thr
MKLLTHNLLSSHVRGVGSRGFPLRLQATEVRICPVEFNPNFVARXIPKVEWSAFLEAADNLRLIQVPKGPVEGYEENEEFLRTMHHLLLEVEVIEGTLQCPESGRMFPISRGIPXMLLSEEETES

SEQ ID NO: 225 - protein, 93 aa, Homo sapiens
  SIGNAL -22..-1
MKISVAAIPFFLLITIALGTKTESSSRGPYHPSECCFTYTTYKIPRQRIMDYYETNSQCSKPGIVFITKRGHSVCTNPSDKWVQDYIKDMKEN

SEQ ID NO: 226 - protein, 72 aa, Homo sapiens [sequence omitted]

SEQ ID NO: 227 - protein, 84 aa, Homo sapiens
  SIGNAL -20..-1: Von Heijne matrix score 4.37180298395146 seq SLLLSLPPHQGLT/FS
MAAAAVPSLLLSLPPHQGLTFSNKIQPFGAQGVLHPEPGLRDWLLPTCSRQLRVALPEKGSEGSLCQTQLPATPCFLPSNTVRT

SEQ ID NO: 228 - protein, 54 aa, Homo sapiens
  SIGNAL -19..-1
MKFNFVLLILSKVLDDTFQSVKKWLNYFQFTLRNGLMWPGAVAHACNPSTGSRL

SEQ ID NO: 229 - protein, 54 aa, Homo sapiens; identical to SEQ ID NO: 228
  SIGNAL -19..-1: Von Heijne matrix score 4.24406450728052 seq LLILSKVLDDTFQ/SV

SEQ ID NO: 230 - protein, 54 aa, Homo sapiens; identical to SEQ ID NO: 228
  SIGNAL -19..-1: Von Heijne matrix score 4.24406450728052 seq LLILSKVLDDTFQ/SV

SEQ ID NO: 231 - protein, 91 aa, Homo sapiens [sequence omitted]

SEQ ID NO: 232 - protein, 114 aa, Homo sapiens
  SIGNAL -32..-1
MQMYSRQLASTEWLTIQGGLLGSGLFVFSLTAFNNLENLVFGKGFQAKIFPEILLCLLLALFASGLIHRVCVTTCFIFSMVGLYYINKISSTLYQAAAPVLTPAKVTGKSKKRN

SEQ ID NO: 233 - protein, 75 aa, Homo sapiens
  SIGNAL -35..-1
MAPEVLPKPRMRGLLARRLRNHMAVAFVLSLGVAALYKFRVADQRKNAYADFYRNYDVMKDFEEMRKAGIFQSVK

SEQ ID NO: 234 - protein, 108 aa, Homo sapiens
  SIGNAL -40..-1
MQKFRKMSETHHSVISVKASSPWLSSSVTAPSMVAPVTFASIVEEELQQEAALIRSREKPLALIQIEEHAIQDLLVFYEAFGNPEEFVIVERTPQGPLAVPMWNKHGC

SEQ ID NO: 235 - protein, 127 aa, Homo sapiens
  SIGNAL -47..-1
MFTPLTVKYAYYDTERIGVDLIMKTCFSPNRVIGLSSDLQQVGGASARIQDALSTVLQYAEDVLSGKVSADNTVGRFLMSLVNQVPKIVPDDFETMLNSNINDLLMVTYLANLTQSQIALNEKLVNL

SEQ ID NO: 236 - protein, 85 aa, Homo sapiens
  SIGNAL -32..-1
MKAALEDTLAETEARFGAQLAHIQALISGIEAQLGDVRADSERQNQEYQRLMDIKSRLEQEIATYRSLLEGQEDHYNNLSASKVL

SEQ ID NO: 237 - protein, 101 aa, Homo sapiens
  SIGNAL -25..-1
MVDRELADIHEDAKTCLVLCSRVLSVISVKEIKTQLSLGRHPIISNWFDYIPSTRYKDPCELLHLCRLTIRNQLLTNNMLPDGIFSLLIPARLQNYLNLEI

SEQ ID NO: 238 - protein, 68 aa, Homo sapiens
  SIGNAL -47..-1
MVKSSLQRILNSHCFAREKEGDKPSATIHASRTMPLLSLHSRGGSSSESSRVSLHCCSNPGPGPRWCS

SEQ ID NO: 239 - protein, 68 aa, Homo sapiens; identical to SEQ ID NO: 238
  SIGNAL -47..-1

SEQ ID NO: 240 - protein, 68 aa, Homo sapiens; identical to SEQ ID NO: 238
  SIGNAL -47..-1: Von Heijne matrix score 3.72491712201476 seq PLLSLHSRGGSSS/ES

SEQ ID NO: 241 - protein, 68 aa, Homo sapiens
  SIGNAL -47..-1: Von Heijne matrix score 3.72491712201476 seq PLLSLHSRGGSSS/ES
  UNSURE 12: Xaa = Asn or Lys
MVKSSLQRILNSHCFAREKEGDKPSATIHASRTMPLLSLHSRGGSSSESSRVSLHCCSXPGPGPRWCS

SEQ ID NO: 242 - protein, 129 aa, Homo sapiens
  SIGNAL -16..-1: Von Heijne matrix score 3.61791418904325 seq LLLLLRALRRGPG/PG
  UNSURE 84: Xaa = Phe or Tyr
  UNSURE 92: Xaa = Gln or His
MAVLLLLLRALRRGPGPGPRPLWGPGPAWSPGFPARPGRGRPYMASRPPGDLAEAGGRALQSLQLRLLTPTFEGINGLLLKQHLVQNPVRLWQLLGGTFXFNTSRLKXKNKEKDKSKGKAPEEDEGIFI

SEQ ID NO: 243 - protein, 129 aa, Homo sapiens
  SIGNAL -16..-1: Von Heijne matrix score 3.61791418904325 seq LLLLLRALRRGPG/PG
MAVLLLLLRALRRGPGPGPRPLWGPGPAWSPGFPARPGRGRPYMASRPPGDLAEAGGRALQSLQLRLLTPTFEGINGLLLKQHLVQNPVRLWQLLGGTFYFNTSRLKQKNKEKDKSKGKAPEEDEGIFI

SEQ ID NO: 244 - protein, 109 aa, Homo sapiens
  SIGNAL -33..-1
  UNSURE 43: Xaa = Asn, Asp, Gly, or Ser
MAASGAPRILVDLLKLNVAPLAVFQMLKSMCAGQRLASEPQDPAAVSLPTSSVPETRGRNKGSAALGGALALAERXSREGSSQRMPRQPSATRLPKGGGPGKSPTRGST

SEQ ID NO: 245 - protein, 103 aa, Homo sapiens
  SIGNAL -36..-1
MANLFIRKMVNPLLYLRRHTVKPRALSTFLFGSIRGAAPVAVEPGAAVRSLLSPGLLPHLLPALGFKNKTVLKKRCKDCYLVKRRGRWYVYCKTHPRHKQRQM

SEQ ID NO: 246 - protein, 86 aa, Homo sapiens [sequence omitted]

SEQ ID NO: 247 - protein, 52 aa, Homo sapiens
  SIGNAL -30..-1
MSSCGIVGSSVSFQLDAVKLLLKMVSSATTERCCNGSANFHKNLCATGIKNF

SEQ ID NO: 248 - protein, 219 aa, Homo sapiens
  SIGNAL -40..-1: Von Heijne matrix score 6.4143157541603 seq ITMSATVVDAVNA/AP
  UNSURE -39: Xaa = Asn or Ile
  UNSURE 13: Xaa = Gln or Glu
PXRKITRLAWILSDGLGASCGGAGGGQITMSATVVDAVNAAPLSGSKEMSLEXPKKMTREDWRKKKELEEQRKLGNAPAEVDEEGKDINPHIPQYISSVPWYIDPSKRPTLKHQRPQPEKQKQFSSSGEWYKRGVKENSIITKYRKGACENCGAMTHKKKDCFERPRRVGAKFTGTNIAPDEHVQPQLMFDYDGKRDRWNGYNPEEHMKIVEEYAKVDL

SEQ ID NO: 249 - protein, 215 aa, Homo sapiens
  SIGNAL -36..-1: Von Heijne matrix score 5.52542399647426 seq ITMSATVXDAVNA/AP
ITRLAWILSDGLGASCGGAGGGQITMSATVVDAVNAAPLSGSKEMSLEEPKKMTREDWRKKKELEEQRKLGNAPAEVDEEGKDINPHIPQYISSVPWYIDPSKRPTLKHQRPQPEKQKQFSSSGEWYKRGVKENSIITKYRKGACENCGAMTHKKKDCFERPRRVGAKFTGTNIAPDEHVQPQLMFDYDGKRDRWNGYNPEEHMKIVEEYAKVDL

SEQ ID NO: 250 - protein, 214 aa, Homo sapiens
  SIGNAL -36..-1
  UNSURE 120: Xaa = Glu or Lys
ITRLAWILSDGLGASCGGAGGGQITMSATVVDAVNAAPLSGSKEMSLEEPKKMTREDWRKKKELEEQRKLGNAPAEVDEEGKDINPHIPQYISSVPWYIDPSKRPTLKHQRPQPEKQKQFSSSGEWYKRGVKENSIITKYRKGACENCGAMTHKKXDCFERPRRVGAKFTGTNIAPDEHVQPQLMFDYDGKRDRWNGYNPEEHMKIVEEYAKVD

SEQ ID NO: 251 - protein, 147 aa, Homo sapiens
  SIGNAL -15..-1
  UNSURE -9: Xaa = Glu or Lys
MDVLVSXCSARLLQQEEEIKSLTAEIDRLKNCGCLGASPNLEQLQEENLKLKYRLNILRKSLQAERNKPTKNMINIISRLQEVFGHAIKAAYPDLENPPLLVTPSQQAKFGDYQCNSAMGISQVMYCHDSWLFDFFKYYYHHCHLQK

SEQ ID NO: 252 - protein, 117 aa, Homo sapiens [sequence omitted]

SEQ ID NO: 253 - protein, 88 aa, Homo sapiens
  SIGNAL -36..-1
MASVVPVKDKKLLEVKLGELPSWILMRDFSPSGIFGAFQRGYYRYYNKYINVKKGSISGITMVLACYVLFSYSFSYKHLKHERLRKYH

SEQ ID NO: 254 - protein, 62 aa, Homo sapiens
  SIGNAL -42..-1
  UNSURE -11: Xaa = Glu or Lys
MDPNCSCAAAGVSCTCASSCKCKECKCTSCKXSCCSCCPVGCAKCAQGCICKGASEKCSCCA

SEQ ID NO: 255 - protein, 132 aa, Homo sapiens
  UNSURE 118: Xaa = Gly or Val
LFPAPAPPPAPAFAPPPKVPSPERSAPRVPLPSPQPSYPFRPAASGGTPPPACLPPAQPCQGSPAMNLFRFLGDLSHLLAIILLLLKIWKSRSCAAHPQLPLSFCLSVCLSVSLSLSXSLSLSFSVSKKKKK

SEQ ID NO: 256 - protein, 163 aa, Homo sapiens
PHRLTLPTLQSVTFRCPSRSEKLGKNMVSSFRVSELQVLLGFAGRNKSGRKHDLLMRALHLLKSGCSPAVQIKIRELYRRRYPRTLEGLSDLSTIKSSVFSLDGGSSPVEPDLAVAGIHSLPSTSVTPHSPSSPVGSVLLQDTKPTFEMQQPSPPIPPVHPDV

SEQ ID NO: 257 - protein, 166 aa, Homo sapiens
PHRLTLPTLQSVTFRCPSRSEKLGKNMVSSFRVSELQVLLGFAGRNKSGRKHDLLMRALHLLKSGCSPAVQIKIRELYRRRYPRTLEGLSDLSTIKSSVFSLDGGSSPVEPDLAVAGIHSLPSTSVTPHSPSSPVGSVLLQDTKPTFEMQQPSPPIPPVHPDVQLK

SEQ ID NO: 258 - protein, 118 aa, Homo sapiens
MSYEQLMQLYSARQRRRLNRGLRRKQHSLLKRLRKAKKEAPPMEKPEVVKTHLRDMIILPEMVGSMVGVYNGKTFNQVEIKPEMIGHYLGEFSITYKPVKHGRPGIGATHSSRFIPLK

SEQ ID NO: 259 - protein, 101 aa, Homo sapiens
  UNSURE 19: Xaa = Ser or Thr
  UNSURE 98: Xaa = Asn or Ile
RTAGRGRPAVASWELRARXCAEDPHQGAGCSCGSRAMAEEQGRERDSVPKPSVLFLHPDLGVGGAERLVLLPFPTERRLLFCTAPRSLNSLPLKKKKXAKS

SEQ ID NO: 260 - protein, 100 aa, Homo sapiens
VRQGGVGPQWPAGSYERGACAEDPHQGAGCSCGSRAMAEEQGRERDSVPKPSVLFLHPDLGVGGAERLVLLPFPTERRLLFCTAPRSLNSLPLKKKKNAK

SEQ ID NO: 261 - protein, 147 aa, Homo sapiens
  UNSURE 90: Xaa = Ala or Gly
MEYVLEVKNSPRHLLKQFTVCDVPLYDICDYNVSRDRCQELGCCFYEGVCYKKAVPIYIHVFSALIVIKAGAFVITIIYRVIQESRKEKXIPVYVALPQKSSEKAELASSSSKLGLKPASPGPPSAGPSMKSDEDKDDVTGTITEAE

SEQ ID NO: 262 - protein, 147 aa, Homo sapiens
MEYVLEVKNSPRHLLKQFTVCDVPLYDICDYNVSRDRCQELGCCFYEGVCYKKAVPIYIHVFSALIVIIAGAFVITIIYRVIQESRKEKAIPVYVALPQKSSEKAELASSSSKLGLKPASPGPPSAGPSMKSDEDKDDVTGTITEAE

SEQ ID NO: 263 - protein, 149 aa, Homo sapiens
MRYNEKELQALSRQPAEMAAELGMRGPKKGSVLKRRLVKLVVNFLFYFRTDEAEPVGALLLERCRVVREEPGTFSISFIEDPERKYHFECSSEEQCQEWMEALRRASYEFMRRSLIFYRNEIRKVTGKDPLEQFGISEEARFQLSGLQA

SEQ ID NO: 264 - protein, 103 aa, Homo sapiens [sequence omitted]

SEQ ID NO: 265 - protein, 78 aa, Homo sapiens
MDPNCSCAAGVSCTCASSCKCKECKCTSCKKSCCSWCTGPTLVDTCPALPPVCLSQRSSGMNLRTHVQWEVRPPLNIQ

SEQ ID NO: 266 - protein, 92 aa, Homo sapiens
MSPQTHSQTCIRNLVTCINYPRTSTGCKGTTTQRIMEPVELEVEGTEQDNAKTCGSLGRGNENTMLRGGFSMNTTVGQGISKQTHHTSTTSS

SEQ ID NO: 267 - protein, 51 aa, Homo sapiens
MLAKTGVHHYSGNNIELGTACGKYYRVCTLAIIDPGDSDIIRSMPEQTGEK

SEQ ID NO: 268 - protein, 99 aa, Homo sapiens
MKKKEETTLSEMEPVEPQYQLVNAESTSPFLHCLREVIGEYSVHEFSLLGKTESQGIGLWIALVVFLSFLIFSTSFYISNAEQPFFKEPPTEAAKELSL

SEQ ID NO: 269 - protein, 128 aa, Homo sapiens
MAGNLLSGAGRRLWDWVPLACRSFSLGVPRLIGIRLTLPPPKVVDRWNEKRAMFGVYDNIGILGNFEKHPKELIRGPIWLRGWKGNELQRCIRKRKMVGSRMFADDLHNLNKRIRYLYKHFNRHGKFR

SEQ ID NO: 270 - protein, 52 aa, Homo sapiens
MFLTLADTCKLRGMSFLLNVYEGEATVSSVLELLESWIIVGNERYFDGISSH

SEQ ID NO: 271 - protein, 84 aa, Homo sapiens
MKVKIKCWNGVATWLWVANDENCGICRMAFNGCCPDCKVPGDDCPLVWGQCSHCFHMHCILKWLHAQQVQQHCPMCRQEWKFKE

SEQ ID NO: 272 - protein, 84 aa, Homo sapiens; identical to SEQ ID NO: 271

SEQ ID NO: 273 - protein, 84 aa, Homo sapiens; identical to SEQ ID NO: 271

SEQ ID NO: 274 - protein, 84 aa, Homo sapiens; identical to SEQ ID NO: 271

SEQ ID NO: 275 - protein, 84 aa, Homo sapiens; identical to SEQ ID NO: 271

SEQ ID NO: 276 - protein, 80 aa, Homo sapiens
MATPTQTPTKAPEEPDPFYYDYNTVQTVGMTLATILFLLGILIVISKKVKCRKADSRSESPTCKSCKSELPSSAPGGGGV

SEQ ID NO: 277 - protein, 127 aa, Homo sapiens
MSFSGKYQLQSQENFEAFMKAIGLPEELIQKGKDIKGVSEIVQNGKHFKFTITAGSKVIQNEFTVGEECELETMTGEKVKTVVQLEGDNKLVTTFKNIKSVTELNGDIITNTMTLGDIVFKRISKRI

SEQ ID NO: 278 - protein, 87 aa, Homo sapiens
DAVAVGKFSQWPPERSPADALCDGKKAAGPTSGAFYNELRALESLPGNYSSASTVVLLWIASRQKSQSSRNSQCSRKDKGGKQEEHE

SEQ ID NO: 279 - protein, 96 aa, Homo sapiens
MPGPTPSGTNVGSSGRSPSKAVAARAAGSTVRQRKNASCGTRSAGRTTSAGTGGMWRFYTEDSPGLKVGPVPVLVMSLLFIASVFMLHIWGKYTRS

SEQ ID NO: 280 - protein, 56 aa, Homo sapiens
MSSWSLMCMQDMGNTKARLLYEANLPENFRRPQTDQAVEFFIRDKYEKKKYYEKMP

SEQ ID NO: 281 - protein, 56 aa, Homo sapiens; identical to SEQ ID NO: 280

SEQ ID NO: 282 - protein, 56 aa, Homo sapiens; identical to SEQ ID NO: 280

SEQ ID NO: 283 - protein, 56 aa, Homo sapiens; identical to SEQ ID NO: 280

SEQ ID NO: 284 - protein, 56 aa, Homo sapiens; identical to SEQ ID NO: 280

SEQ ID NO: 285 - protein, 56 aa, Homo sapiens; identical to SEQ ID NO: 280

SEQ ID NO: 286 - protein, 56 aa, Homo sapiens; identical to SEQ ID NO: 280

SEQ ID NO: 287 - protein, 56 aa, Homo sapiens; identical to SEQ ID NO: 280

SEQ ID NO: 288 - protein, 56 aa, Homo sapiens; identical to SEQ ID NO: 280

SEQ ID NO: 289 - protein, 56 aa, Homo sapiens; identical to SEQ ID NO: 280

SEQ ID NO: 290 - protein, 56 aa, Homo sapiens; identical to SEQ ID NO: 280

SEQ ID NO: 291 - protein, 56 aa, Homo sapiens; identical to SEQ ID NO: 280

SEQ ID NO: 292 - protein, 56 aa, Homo sapiens; identical to SEQ ID NO: 280

SEQ ID NO: 293 - protein, 56 aa, Homo sapiens; identical to SEQ ID NO: 280

SEQ ID NO: 294 - protein, 56 aa, Homo sapiens; identical to SEQ ID NO: 280

SEQ ID NO: 295 - protein, 122 aa, Homo sapiens
  UNSURE 113: Xaa = Ala or Asp
MEASALTSSAVTSVAKVVRVASGSAVVLPLARIATVVIGGVVAMAAVPMVLSAMGFTAAGIASSSIAAKMMSAAAIANGGGVASGSLVATLQSLGATGLSGLTKFILGSIGSXIAAVIARFY

SEQ ID NO: 296 - protein, 122 aa, Homo sapiens
  UNSURE 79: Xaa = Arg or Gly
MEASALTSSAVTSVAKVVRVASGSAVVLPLARIATVVIGGVVAMAAVPMVLSAMGFTAAGIASSSIAAKMMSAAAIANXGGVASGSLVATLQSLGATGLSGLTKFILGSIGSAIAAVIARFY

SEQ ID NO: 297 - protein, 74 aa, Homo sapiens
MASSTVPVSAAGSANETPEIPDNVGDWLRGVYRFATDRNDFRRNLILNLGLFAAGVWLARNLSDIDLMAPQPGV

SEQ ID NO: 298 - protein, 74 aa, Homo sapiens; identical to SEQ ID NO: 297

SEQ ID NO: 299 - protein, 147 aa, Homo sapiens
MDVLVSECSARLLQQEEEIKSLTAEIDRLKNCGCLGASPNLEQLQEENLKLKYRLNILRKSLQAERNKPTKNMINIISRLQEVFGHAIKAAYPDLENPPLLVTPSQQAKFGDYQCNSAMGISQVMYCHDSWLFDFFKYYYHHCHLQK

SEQ ID NO: 300 - protein, 97 aa, Homo sapiens
MSSAPEPPTFKKEPPKEKEFQSPGLRGVRTTTLFRAVNPELFIKPNKPVMAFGLVTLSLCVAYIGYLHAIQENKKDLYEAIDSEGHSYMRRKTSKWD

SEQ ID NO: 301 - protein, 98 aa, Homo sapiens
  UNSURE 30: Xaa = Asn or Lys
MAAEPLTELEESIENVVTTFFTFARQEGRXDSLSVNEFKELVTQQLPHLLKDVGSLDEKMKSLDVNQDSELKFNEYWRLIGELAKEIRKKKDLKIRKK

SEQ ID NO: 302 - protein, 115 aa, Homo sapiens
  UNSURE 100: Xaa = Gly or Ser
  UNSURE 103: Xaa = Asp or Tyr
MVAAKKTKKSLESIKSRLQLVMKSGKYVLGYKQTLKMIRQGKAKLVILANNCPALRKSEIEYYAMLAKTGVHHYSGNNIELGTACGKYYRVCTLAIIDPXDSXIIRSMPEQTGEK

SEQ ID NO: 303 - protein, 102 aa, Homo sapiens
MAGQAFRKFLPLFDRVLVERSPAETVTKGGIMLPEKSQGKVLQATVVAVGSGSKGKGGEIQPVSVKVGDKVLLPEYGGTKVVLDNKDYFLFRDGDILGKYVD

SEQ ID NO: 304 - protein, 102 aa, Homo sapiens
MAGQAFRKFLPLFDRVLVERSAAETVTKGGIMLPEKSQGKVLQATVVAVGSGSKGKGGEIQPVSVKVGDKVLLPEYGGTKVVLDDKDYFLFRDGDILGKYVD

SEQ ID NO: 305 - protein, 116 aa, Homo sapiens
MSATAATAPPAAPAGEGGPPAPPPNLTSNRRLQQTQAQVDEVVDIMRVNVDKVLERDQKLSELDDRADALQAGPSQFETSAAKLKRKYWWKNLKMMIILGVICAIILIIIIVYFST

SEQ ID NO: 306 - protein, 97 aa, Homo sapiens
MSLSLVFRAASYFKLVPFHSSSSNQFLQPPGWVVLTQTLVLLHFERFSYQNVPKSAQGKGNLQPETNIHLFHFLTFPKQISRNLFNSLLCLMCLTYF

SEQ ID NO: 307 - protein, 110 aa, Homo sapiens
MSMTDLLNAEDIKKAVGAFSATDSFDHKKFFQMVGLKKKSADDVKKVFHMLDKDKSGFIEEDELGFILKGFSPDARDLSAKETKMLMAAGDKDGDGKIGVDEFSTLVAES

SEQ ID NO: 308 - protein, 110 aa, Homo sapiens; identical to SEQ ID NO: 307

SEQ ID NO: 309 - protein, 110 aa, Homo sapiens; identical to SEQ ID NO: 307

SEQ ID NO: 310 - protein, 112 aa, Homo sapiens
  UNSURE 8: Xaa = Asp or Glu
  UNSURE 33: Xaa = Asp or Glu
MDPRKVNXLRAFVKMCKQDPSVLHTEEMRFLRXWVESMGGKVPPATQKAKSEENTKEEKPDSKKVEEDLKADEPSSEESDLEIDKEGVIEPDTDAPQEMGDENAEITAQHFL

SEQ ID NO: 311 - protein, 118 aa, Homo sapiens
MVLLESEQFLTELTRLFQKCRTSGSVYITLKKYDGRTKPIPKKGTVEGFEPADNKCLLRATDGKKKISTVVSSKEVNKFQMAYSNLLRANMDGLKKRDKKNETKKTKAAAAAAATAAQ

SEQ ID NO: 312 - protein, 109 aa, Homo sapiens [sequence omitted]

SEQ ID NO: 313 - protein, 103 aa, Homo sapiens
  UNSURE 99: Xaa = Arg or Thr
  UNSURE 103: Xaa = Asn or His
MSGDGATEQAAEYVPEKVKKAEKKLEENPYDLDAWSILIREAQNQPIDKARKTYERLVAQFPSSGRFWKLYIEAEVTILFYFFLYQYCSIHCSDRKQVXNIAX

SEQ ID NO: 314 - protein, 72 aa, Homo sapiens
MSGDGATEQAAEYVSEKVKKAEKKLEENPYDLDAWSILIREAQNQPIDKARKTYERLVAQFPSSGRFWKLYI

SEQ ID NO: 315 - protein, 106 aa, Homo sapiens [sequence omitted]

SEQ ID NO: 316 - protein, 86 aa, Homo sapiens
MAEDMETKIKNYKTAPFDSRFPNQNQTRNCWQNYLDFHRCQKAMTAKGGDISVCEWYQRVYQSLCPTSWVTDWDEQRAEGTFPGKI

SEQ ID NO: 317 - protein, 105 aa, Homo sapiens [sequence omitted]

SEQ ID NO: 318 - protein, 101 aa, Homo sapiens
MERPDKAALNALQPPEFRNESSLASTLKTLLFFTALMITVPIGLYFTTKSYIFEGALGMSNRDSYFYAAIVAVVAVHVVLALFVYVAWNEGSRQWREGKQD

SEQ ID NO: 319 - protein, 92 aa, Homo sapiens
  UNSURE 28: Xaa = Arg, Asn, Lys, or Ser
  UNSURE 29: Xaa = Arg or Gly
MFRDFGRRLQRDLKRVVDARLRLSEELXXGRIKPKPVEVQVVTHHMQRYAVWFGGSMLASTPEFFQVCHTKKDYEEYGPSICRHNPVFGVMS

SEQ ID NO: 320 - protein, 92 aa, Homo sapiens
MFRDFGRRLQRDLKRVVDARLRLSEELSGGRIKPKPVEVQVVTHHMQRYAVWFGGSMLASTPEFFQVCHTKKDYEEYGPSICRHNPVFGVMS

SEQ ID NO: 321 - protein, 98 aa, Homo sapiens
MSVSFHTHTKELWTWMEDLQKEMLEDVCADSVDAVQELIKQFQQQQTATLDATLNVIKEGEDLIQQLRSAPPSLGEPSEARSAWAELSSGKCLGLDVR

SEQ ID NO: 322 - protein, 89 aa, Homo sapiens [sequence omitted]

SEQ ID NO: 323 - protein, 123 aa, Homo sapiens
MALNNVSLSSGDQRSRVAYRSSHGDLRPRASALAMVSGDGFLVSRPEAIHLGPRQAVRPSVRAESRRVDGGGRSPREPDGRGRSRQARFSPYPIPAVEPDLLRSVLQQRLIALGGVIAARISV

SEQ ID NO: 324 - protein, 172 aa, Homo sapiens
MAGAATQASLESAPRIMRLVAECSRSRARAGELWLPHGTVATPVFMPVGTQATMKGITTEQLDALGCRICLGNTYHLGLRPGPELIQKANGLHGFMNWPHNLLTDSGGFQMVSLVSLSEVTEEGVRFRSPYDGNETLLSPEKSVQIQNALGSDIIMQLDDVVSSTVTGPRVE

SEQ ID NO: 325 - protein, 20 aa, Homo sapiens
MAIKFLEVIKPFCVILQLTS

SEQ ID NO: 326 - protein, 23 aa, Homo sapiens
FLNNSSPQEPLKLPPGQLSSTHR

SEQ ID NO: 327 - protein, 45 aa, Homo sapiens
  UNSURE 27: Xaa = Phe or Ser
MESDDARAARVKELLVDCYKPTEAFIXGLLDKIRGMQKLSTPQKK

SEQ ID NO: 328 - protein, 109 aa, Homo sapiens
MAASAARGAAALRRSINQPVAFVRRIPWTAASSQLKEHFAQFGHVRRCILPFDKETGFHRGLGWVQFSSEEGLRNALQQENHIIDGVKVQVHTRRPKLPQTSDDEKKDF

SEQ ID NO: 329 - protein, 51 aa, Homo sapiens [sequence omitted]

SEQ ID NO: 330 - protein, 38 aa, Homo sapiens
PVRGLNMSEFVCNLSARPYVYDLIAVSNHYGAMGVGHY

SEQ ID NO: 331 - protein, 13 aa, Homo sapiens
MLGFAKNWIFSIT

SEQ ID NO: 332 - protein, 13 aa, Homo sapiens
MLGFAKNWIFSIT

SEQ ID NO: 333 - protein, 13 aa, Homo sapiens
MLGFAKNWIFSIT

SEQ ID NO: 334 - protein, 13 aa, Homo sapiens
MLGFAKNWIFSIT

SEQ ID NO: 335 - protein, 13 aa, Homo sapiens
MLGFAKNWIFSIT

SEQ ID NO: 336 - protein, 13 aa, Homo sapiens
MLGFAKNWIFSIT

SEQ ID NO: 337 - protein, 109 aa, Homo sapiens; identical to SEQ ID NO: 328

SEQ ID NO: 338 - protein, 59 aa, Homo sapiens
MKFGCLSFRQPYAGFVLNGIKTVETRWRPLLSSQRNCTIAVHIAHRDWEGDACRELLVE

SEQ ID NO: 339 - DNA, 506 bp, Homo sapiens
  CDS 88..471
  sig_peptide 88..189: Von Heijne matrix score 13.6000003814697 seq VLLLLSLLLTALA/SS
acttatctgcagacttgtaggcagcaactcaccctcactcagaggtcttctggttctggaaacaactctagctcagccttctccaccatgagcctcagacttgataccaccccttcctgtaacagtgcgagaccacttcatgccttgcaggtgctgctgcttctgtcattgctgctgactgctctggcttcctccaccaaaggacaaactaagagaaacttggcgaaaggcaaagaggaaagtctagacagtgacttgtatgctgaactccgctgcatgtgtataaagacaacctctggaattcatcccaaaaacatccaaagtttggaagtgatcgggaaaggaacccattgcaaccaagtcgaagtgatagccacactgaaggatgggaggaaaatctgcctggacccagatgctcccagaatcaagaaaattgtacagaaaaaattggcaggtgatgaatctgctgattaatttgttctgtttctgccaaacttctttaactc

SEQ ID NO: 340 - DNA, 523 bp, Homo sapiens
  CDS 41..235
  sig_peptide 41..94: Von Heijne matrix score 12.1999998092651 seq LTLAVLFLTGSQA/RH
ttagagactgcgagaaggaggtcccccacggcccttcaggatgaaagctgcggtgctgaccttggccgtgctcttcctgacggggagccaggctcggcatttctggcagcaagatgaacccccccagagcccctgggatcgagtgaaggacctggccactgtgtacgtggatgtgctcaaagacagcggcagagactatgtgtcccagtttgaaggctccgcttgggaaaacagctaaacctaaagctccttgacaactgggacagcgtracctccrccttcagcaakctgcgcgaacagctcggccctgtgacccaggagttctgggataacctggaaaaggagacagagggcctgaggcaggagatgagcaaggatctggaggaggtgaaggccaasgtgcagccctacctggacgacttccagaagaagtggcaggaggagatggagctctaccgccagaaggcagctttcttaactatcctaacaagccttggaccaaatggaaataaagctttttgat

SEQ ID NO: 341 - DNA, 580 bp, Homo sapiens
  CDS 134..373
  sig_peptide 134..211: Von Heijne matrix score 12 seq LLLALLLPTQIYS/SE
  Unsure 302..304: Xaa = Ala or Val
atttgtggctttcctggtatataaggtctcgccggctcgccgcgctccccaccttgcctgcgcccgcccggagccagcggttctccaagcacccagcatcctgctagacgcgccgcgcaccgacggaggggacatgggcagagcaatggtggccaggctcgggctggggctgctgctgctggcactgctcctacccacgcagatttattccagtgaaacaacaactggaacttcaagtaactcctcccagagtacttccaactctgggttggccccaaatccaactaatgccaccaccaaggyggctggtggtgccctgcagtcaacagccagtctcttcgtggtctcactctctcttctgcatctctactcttaagagactcaggccaagaaacgtcttctaaatttccccatcttctaaacccaatccaaatggcgtctggaagtccaatgtggcaaggaaaaacaggtcttcatcgaatctactaattccacaccttttattgacacagaaaatgttgagaatcccaaatttgattgatttgaagaacatgtgagaggkttgactagatgatggatg

SEQ ID NO: 342 - DNA, 508 bp, Homo sapiens
  CDS 76..378
  sig_peptide 76..156: Von Heijne matrix score 11.8000001907349 seq LFLGLLLLPLVVA/FA
aattggccacagagacccagcccgagtttcccatcgcactgagcactgagatcctgctggaagctctgccgcagcatgagctccgcagccgggttctgcgcctcacgccccgggctgctgttcctggggttgctgctcctgccacttgtggtcgccttcgccagcgctgaagctgaagaagatggggacctgcagtgcctgtgtgtgaagaccacctcccaggtccgtcccaggcacatcaccagcctggaggtgatcaaggccggaccccactgccccactgcccaactgatagccacgctgaagaatggaaggaaaatttgcttggacctgcaagccccgctgtacaagaaaataattaagaaacttttggagagttagctactagctgcctacgtgtgtgcatttgctatatagcatacttcttttttccagtttcaatctaactgtgaaagaacttctgatatttgtgttatccttatgattttaaataaacaaaataaatcta

SEQ ID NO: 343 - DNA, 459 bp, Homo sapiens
  CDS 75..332
  sig_peptide 75..128: Von Heijne matrix score 11.6999998092651 seq VLLLLLLVEQAAA/LG
gactctttggtcagggaactgctcgctgagcacagctgcacagtgctgtcagaacggccgatctccagcccaagatgattccagcagtggtcttgctcttactccttttggttgaacaagcagcggccctgggagagcctcagctctgctatatcctggatgccatcctgtttctgtatggaattgtcctcaccctcctctactgtcgactgaagatccaagtgcgaaaggcagctataaccagctatgagaaatcagatggtgtttacacgggcctgagcaccaggaaccaggagacttacgagactctgaagcatgagaaaccaccacagtagccttagaatagatgcggtcatattcttctttggcttctggttcttccagccctcatgtttggcatcacatatgcctgcatgccattaacaccagctggccctacccctataatgatcctgtgtc

SEQ ID NO: 344 - DNA, 553 bp, Homo sapiens
  CDS 160..435
  sig_peptide 160..231: Von Heijne matrix score 11.6999998092651 seq FVLGLGLTPPTLA/QD
agatgcaaagcaggattcaaaagaacatctttgcgttttctaccggctccccatcatcgtactagggaggaagaagcgggtgagaaacaaaacttctttccattgtcctgcccgtttctgcggacttgttctgaggccgaggagcctgtgttggaagagatggtgatgggcctgggcgttttgttgttggtcttcgtgctgggtctgggtctgaccccaccgaccctggctcaggataactccaggtacacacacttcctgacccagcactatgatgccaaaccacagggccgggatgacagatactgtgaaagcatcatgaggagacggggcctgacctcaccctgcaaagacatcaacacatttattcatggcaacaagcgcagatcaaggccatctgtgaaaacaagaatggaaaccctcacagagaaaacctaagaataagcaagtcttctttccaggtcaccacttgcaagctacatggaggttcccctggcctccatgccagtaccgagccacagcggggttcagaaacgttgttgttgcttgtgaa

SEQ ID NO: 345 - DNA, 499 bp, Homo sapiens
  CDS 39..371
  sig_peptide 39..86: Von Heijne matrix score 11.5 seq ILLSVALLAFSSA/QD
  Unsure 234..236: Xaa = Asn or Asp
agcataaagttgggagtgacaccagagccttctgcaagatgcttctgattctgctgtcagtggccctgctggccttcagctcagctcaggacttagatgaagatgtcagccaagaagacgttcccttggtaatatcagatggaggagactctgagcagttcatagatgaggagcgtcagggaccacctttgggaggacagcaatctcaaccctctgctggtgatgggaaccagratgatggccctcagcagggaccaccccaacaaggaggccagcagcaacaaggtccaccacctcctcagggaaagccacarggaccacctccccaagggggccgcccacaaggacctccacaggggcagtctcctcagtaatctaggattcaatgacaggaagtgaataagaagatgacagtgtttcaaatgccttgaaacataatgtgatcatgctctaacttcaatataccaataaaataatcagcttgcaaaaaaaaaaaaaa

SEQ ID NO: 346 - DNA, 398 bp, Homo sapiens
  CDS 36..353
  sig_peptide 36..83: Von Heijne matrix score 11.5 seq ILLSVALLAFSSA/QD
ataaagttgggagtgacaccagagccttctgcaagatgcttctgattctgctgtcagtggccctgctggccttcagctcagctcaggacttagatgaagatgtcagccaagaagacgttcccttggtaatatcagatggaggagactctgagcagttcatagatgaggagcgtcagggaccacctttgggaggacagcaatctcaaccctctgctggtgatgggaaccaggatgatggccctcagcagggaccaccccaacaaggaggccagcagcaacaaggtccaccacctcctcagggaaagccacaaggaccaccccaacagggaggccagtcttgttgctgtgacaagtaacagccttttttttaaattgttttttatacaaaaaaaaaaaaa

SEQ ID NO: 347 - DNA, 525 bp, Homo sapiens
  CDS 48..470
  sig_peptide 48..119: Von Heijne matrix score 10.8999996185303 seq LAGLCCLVPVSLA/ED
ctcctcagcttcaggcaccaccactgacctgggacagtgaatcgacaatgccgtcttctgtctcgtggggcatcctcctgctggcaggcctgtgctgcctggtccctgtctccctggctgaggatccccagggagatgctgcccagaagacagatacatcccaccatgatcaggatcacccaaccttcaacaagatcacccccaacctggctgagttcgccttcagcctataccgccagctggcacaccagtccaacagcaccaatatcttcttctccccagtgagcatcgctacagcctttgcaatgctctccctggggaccaaggctgacactcacgatgaaatcctggagggcctgaatttcaacctcacggagattccggaggctcagatccatgaaggcttccaggaactcctccgtaccctcaaccagccagacagccagctccagctgaccaccggcaagaattaatgctttcttaactaagtttactttgagtattaacaagtagcttatactgagg

SEQ ID NO: 348 - DNA, 500 bp, Homo sapiens
  CDS 91..462
  sig_peptide 91..180: Von Heijne matrix score 9.89999961853027 seq LLFGFTLVSGTGA/EK
acccctaccccacgccccctcccgcgcgcgcggttaaatccccgcacctgagcatcggctcacacctgcaccccgcccgggcatagcaccatgcctgcttgtcgcctaggcccgctagccgccgccctcctcctcagcctgctgctgttcggcttcaccctagtctcaggcacaggagcagagaagactggcgtgtgccccgagctccaggctgaccagaactgcacgcaagagtgcgtctcggacagcgaatgcgccgacaacctcaagtgctgcagcgcgggctgtgccaccttctgctctctgcccaatgataaggagggttcctgcccccaggtgaacattaactttccccagctcggcctctgtcgggaccagtgccaggtggacagccagtgtcctggccagatgaaatgctgccgcaatggctgtgggaaggtgtcctgtgtcactcccaatttctgagctccagccaccaccaggctgagcagtgaggagag

SEQ ID NO: 349 - DNA, 519 bp, Homo sapiens
  CDS 28..399
  sig_peptide 28..117: Von Heijne matrix score 9.89999961853027 seq LLFGFTLVSGTGA/EK
acctgcaccccgcccgggcatagcaccatgcctgcttgtcgcctaggcccgctagccgccgccctcctcctcagcctgctgctgttcggcttcaccctagtctcaggcacaggagcagagaagactggcgtgtgccccgagctccaggctgaccagaactgcacgcaagagtgcgtctcggacagcgaatgcgccgacaacatcaagtgctgcagcgcgggctgtgccaccttctgctctctgcccaatgataaggagggttcctgcccccaggtgaacattaactttccccagctcggcctctgtcgggaccagtgccaggtggacagccagtgtcctggccagatgaaatgctgccgcaatggctgtgggaaggtgtcctgtgtcactcccaatttctgagctccagccacaggctgagcagtgaggagagaaagtttctgcctggccctgcatctggttccagcccacctgccctcccctttttcggggactctgtattccctcttgggctgacca

SEQ ID NO: 350 - DNA, 482 bp, Homo sapiens
  CDS 40..246
  sig_peptide 40..90: Von Heijne matrix score 9.5 seq FVFLLFVISLAAA/AH
aaaaagtaggacaccggagctagcagtggcaacccacttatgtttcctggctttgtttttttgctctttgtaataagtcttgctgctgctgctcatctttgggtcctggccgcctttatgggccgtatcaccgtgaaggtctgcagcttcactcctgaggccagcaagaccgtgagcccaccagaaggagcgaacaactcgagacgcactgcttttaagagctgtaacactcaccacaaaggtctgtagcatcactcctgaagtcagcgggaccacgaacctaccagaaagaagaaactccatacagatctgaaaatctgaaggaacaaactccggacacaccatctttaagaactgtaacactcactgcgagggtccacggcttcatttttgaagtcagccagaccaagaacccaccaattccgcacacacttctgctgtttcgttccattctcaaggaaaactgtgatgggtccattttt

SEQ ID NO: 351 - DNA, 462 bp, Homo sapiens
  CDS 114..344
  sig_peptide 114..212: Von Heijne matrix score 9.30000019073486 seq MVLLSFALTLCSA/FW
wctgctcactgctgggtactgttctgctgtgggtgcccaggaagggactacacctcttcgcagtgttttatacctttggtaatatcgcatcaattgggagtaccatcttcctcatgggaccagtgaaacagctgaagcgaatgtttgagcctactcgtttgattgcaactatcatggtgctgttgagttttgcacttaccctgtgttctgccttttggtggcataacatgggacttgcacttatcttctgcattttgcagtctttggcattgacgtggtacagcctttccttcataccatttgcaagggatgctgtgaagaagtgttttgccgtgtgtcttgcataattcatggccagttttatgaagctttggaaggcactatggacagaagctggtggacagttttgtaactatcttcgaaacctctgtcttacagacatgtgccttttatcttgcagca

SEQ ID NO: 352 - DNA, 496 bp, Homo sapiens
  CDS 29..466
  sig_peptide 29..106: Von Heijne matrix score 8.89999961853027 seq GLLWAFCAPGARA/EE
cgtctgcttcggagaccgtaagatattgatgaccatgagatccctgctcagaacccccttcctgtgtggcctgctctgggccttttgtgccccaggcgccagggctgaggagcctgcagccagcttctcccaacccggcagcatgggcctggataagaacacagtgcacgaccaagagcatatcatggagcatctagaaggtgtcatcaacaaaccagaggcggagatgtcgccacaagaattgcagctccattacttcaaaatgcatgattatgatggcaataatttgcttgatggcttagaactctccacagccatcactcatgtccataaggaggaagggagtgaacaggcaccactaatgagtgaagatgaactgattaacataatagatggtgttttgagagatgatgacaagaacaatgatggatacattgactatgctgaatttgcaaaatcactgcagtagatgttatttggcatctcctggttatat

SEQ ID NO: 353 - DNA, 499 bp, Homo sapiens
  CDS 155..340
  sig_peptide 155..292: Von Heijne matrix score 8.60000038146973 seq AVLLLILFAIVFG/LL
cttttcctctcaacagttgcttctttgagtcagggtgcagctctggtcacctggcggcctcttcagctcagccctccacaaagtgtgagcctgaaggaccaccctgaattgcccttgtaggacccagaacagcwaccagcagaatcagattctcatggaccaaytggtattcaaagagacaatctggaatgatgcgttctggcagaacccctgggaccaggggggcctggcagtgattatcttattcatcaccgctgtcctgcttctcatcttatttgccatcgtgtttggtttactcacttccacagaaaacactcagtgtgaagcgggtgaagaggagtgacctgacttgctggggactgagatggcagcaggggaggcgagctgacctgcccccattccagtggtgggcccttcgcggttccctctggctcaggggccaagcctggtgtcttcctttcccaccaggaaaaagtctagtaaaatactgtatctggct

SEQ ID NO: 354 - DNA, 537 bp, Homo sapiens
  CDS 13..498
  sig_peptide 13..153: Von Heijne matrix score 8.30000019073486 seq LALSSLLSLLLFA/GM
tagcgctgacgcatgcgcatagctaaccgcacccggttcagctcgcctttcttggccagaggcgccggttggactcacgggcggggcatgatggtggtgggtacgggcacctcgctggcgctctcctccctcctgtccctgctgctctttgctgggatgcagatgtacagccgtcagctggcctccaccgagtggctcaccatccagggcggcctgcttggttcgggtctcttcgtgttctcgctcactgccttcaataatctggagaatcttgtctttggcaaaggattccaagcaaagatcttccctgagattctcctgtgcctcctgttggctctctttgcatctggcctcatccaccgagtctgtgtcaccacctgcttcatcttctccatggttggtctgtactacatcaacaagatctcctccaccctgtaccaggcagcagctccagtcctcacaccagccaaggtcacaggcaagagcaagaagagaaactgaccctgaatgttcaataaagttgattctttgcaaaaa

SEQ ID NO: 355 - DNA, 514 bp, Homo sapiens
  CDS 132..401
  sig_peptide 132..236: Von Heijne matrix score 8.30000019073486 seq LGLGLVTLTASWA/AL
ccttcagckcccggccgagagcccggtggctgcgactgakagcctggttactgccggcacctttggatcctcggccaattctctgcttcgcctacacttggcgtgcggtgtaccagcctccccgcgtcaccatggaaacaggagcctctgcatccatcccagagctgatctgtgaagctatgagaagaatctggagcctgggattggggttggtgactctgacggccagctgggcagctcttttccacgatggctttgcggttcttggaggaaacattgtgagcgatctcagcacagtaagatttgttgcacaacagcagcacttccagctccttgacgtgtggaccaggaatttccggaagccactgggcagcatgtgctttgttttcttgttgctcccataatcaatgttgggcatcaagatctaacccttgaaccttccacgaaccctgttgtcaatacctctgggtttccgccggttacgcttaattttgacatatcggtcagactggtg

SEQ ID NO: 356 - DNA, 589 bp, Homo sapiens
  CDS 41..223
  sig_peptide 41..115: Von Heijne matrix score 8.10000038146973 seq ATLLLVLCLQLGA/NK
  Unsure 194..196: Xaa = Ala or Val
accacttctctgggacacattgccttctgttttctccagcatgcgcttgctccagctcctgttcagggccagccctgccaccctgctcctggttctctgcctgcagttgggggccaacaaagctcaggacaacactcggaagatcataataaagaattttgacattcccaagtcagtacgtccaaatgacgaagyactgcagtgcttgcagttcaaacagaattgaaagaatgcatggtggttaaaacttacctcattagcagcatccctctacaaggtgcatttaactataagtatactgcctgcctatgtgacgacaatccaaaaaccttctactgggacttttacaccaacagaactgtgcaaattgcagccgtcgttgatgttattcgggaattaggcatctgcctgatgatgctgctgtaatccccatcaaaaacaaccggttttatactattgaaatcctaaaggtagaataatggaagccctgtctgtttgccacacccaggtgatttcctctaaagaaacttggctggaatttctgctgtggtctataaaataaacttcttaacatacaaaaaaaaaaaaa

SEQ ID NO: 357 - DNA, 465 bp, Homo sapiens
  CDS 19..378
  sig_peptide 19..114: Von Heijne matrix score 7.59999990463257 seq VTLGIGFFALASA/LW
cctaatcgmwaaagtcatatggcttcacctaaaggtttttttaattacttgacctattttcttgctgctggtgctgtcactttgggaattggtttctttgctttggcatcagctttgtggttcctgatttgcaaacgaagagaaatatttcaaaattccaaatttaaagcaattgatgagagatgcaggcaaagaccatcaatggcgaaaattaaatctcattctcagtgtgtttttatttctcgaaattttcatactgggagattccaattacagcaattaaagatcattctaaagatgaaccccaacttgcaacaaaaaatatcatttgtgatccctcagagaccagctccacaacaaatcgcagcagtgttacattaagcttatcaacattaccatctgattcttattacagccaaagtatagaagcagctgatgactggttttctgatgattctctagtga

SEQ ID NO: 358 - DNA, 438 bp, Homo sapiens
  CDS 84..317
  sig_peptide 84..140: Von Heijne matrix score 7.59999990463257 seq ALVLALMISMISA/DS
atagaaaaggacatctcttgagacttcacttcagcttcactgacttcttgactctcctcttgagtaaaaggactcagccaactatgaagttttttgtctttgctttagtcttggctctcatgatttccatgattagcgctgattcacatgaaaagagacatcatgggtatagaagaaaattccatgaaaagcatcattcataccatatcacactactaccactttttgaagaatcatcaaagagcaatgcaaatgaaaaacactataatttactgtatactctttgtttcaggatacttgccttttcaattgtcacttgatgatataattgcaatttaaactgttaagctgtgttcagtactgtttctgaataatagaaatcacttctctaaaagcaataaatttcaagcacatttttaaataaaaaaaatmtmaaaa

SEQ ID NO: 359 - DNA, 537 bp, Homo sapiens
  CDS 57..317
  sig_peptide 57..116: Von Heijne matrix score 7.40000009536743 seq LLVFLAGFPVLDA/ND
gatttctcccggaacctctgctcagcctggtgaaccacacaggccagcgctctgacatgcagaaggtgaccctgggcctgcttgtgttcctggcaggctttcctgtcctggacgccaatgacctagaagataaaaacagtcctttctactatgactggcacagcctccaggttggcgggctcatctgcgctggggttctgtgcgccatgggcatcatcatcgtcatgagtgcaaaatgcaaatgcaagtttggccagaagtccggtcaccatccaggggagactccacctctcatcaccccaggctcagcccaaagctgatgaggacagaccagctgaaattgggtggaggaccgttctctgtccccaggtcctgtctctgcacagaaacttgaactccaggatggaattcttcctcctctgctgggactcctttgcatggcagggctcatctcacctctcgcaagagggtctctttgttcaattttttttaatctaaaatgattgtgcctctgcccaaaaaaaaaaaaaaaaagct

SEQ ID NO: 360 - DNA, 499 bp, Homo sapiens
  CDS 69..383
  sig_peptide 69..125: Von Heijne matrix score 7.19999980926514 seq VSIMLLLVTVSDC/AV
  Unsure 234..236: Xaa = Lys or *
acaaggctgagcgggaggaagcgagaggcatctaagcaggcagtgttttgccttcaccccaagtgaccatgagaggtgccacgcgagtctcaatcatgctcctcctagtaactgtgtctgactgtgctgtgatcacaggggcctgtgagcgagatgtccagtgtggggcaggcacctgctgtgccatcagcctgtggcttcgagggctgcggatgtgcaccccgctggggcggwaaggcgaggagtgccaccccggcagccacaagatccccttcttcaggaaacgcaagcaccacacctgtccttgcttgcccaacctgctgtgctccaggttcccggacggcaggtaccgctgctccatggacttgaagaacatcaatttttaggcgcttgcctggtctcaggatacccaccatccttttcctgagcacagcctggatttttatttctgccatgaaacccagctcccatgactctcccagtccctasactgactacc

SEQ ID NO: 361 - DNA, 479 bp, Homo sapiens
  CDS 129..434
  sig_peptide 129..236: Von Heijne matrix score 7 seq PFFLITLVGVVVA/VV
  Unsure 327..329: Xaa = Arg or His
tccggggcccgggagccaaccgagggcgttcctgtcggggctgcagcggcgggagggagcccagtggaggcgccctcccgaagcgccactgcycatgctgaccacccagccctccggctgctgatgtcatgagtaacaccactgtgcccaatgccccccaggccaacagcgactccatggtgggctatgtgttggggcccttcttcctcatcaccctggtcggggtggtggtggctgtggtaatgtatgtacagaagaaaaagcgggtggaccggctgcgccatcacctgctccccatgtacagctatgacccagctgaggaactgcrtgaggctgagcaggagctgctctctgacatgggagaccccaaggtggtacatggctggcagagtggctaccagcacaagcggatgccactgctggatgtcaagacgtgacctgacccccttgccccacccttcagagcctggggtcctgga

SEQ ID NO: 362 - DNA, 453 bp, Homo sapiens
  CDS 30..440
  sig_peptide 30..83: Von Heijne matrix score 7 seq VLGLVLLSVTVQG/KV
cagcctagcactctgacctagcagtcaacatgaaggctctcattgttctggggcttgtcctcctttctgttacggtccagggcaaggtctttgaaaggtgtgagttggccagaactctgaaaagattgggaatggatggctacaggggaatcagcctagcaaactggatgtgtttggccaaatgggagagtggttacaacacacgagctacaaactacaatgctggagacagaagcactgattatgggatatttcagatcaatagccgctactggtgtaatgatggcaaaaccccaggagcagttaatgcctgtcatttatcctgcagtgggtggcatggagaaatcgttgtcaaaacagagatgtccgtcagtatgttcaaggttgtggagtgtaactccagaattttccttcttcagctcattttgtctctctcacattaaggggagtagg

SEQ ID NO: 363 - DNA, 417 bp, Homo sapiens
  CDS 82..384
  sig_peptide 82..168: Von Heijne matrix score 6.90000009536743 seq VCMCVFSTQGALG/EM
  Unsure 404: n = a, g, c or t
gctacctcctggtgtctgttgcctggtgtgtgggaaacccccacacgctggaccacagaagtcttctgtgttgactgttgaatgagggaagagaaaaagccctttgagagagagagagagagtgtgtgtgtgtgtatgtgtgtgttttccactcaaggagctttgggggaaatggctgcacacttcatagatgaaaagctgaggcccagtgaggggaatggtcacagagggacactggatagcctgagttcggaccaagagtcctacatcccctccaccgccgaccccacccaggctggccctgagctgctgcacaagaacttgcccgtgacctcccgatcccagccgctgccctctgacctcgcgatcccagccgctgccctctgacctcccgatcccagccngctgccctcgctg

SEQ ID NO: 364 - DNA, 529 bp, Homo sapiens
  CDS 114..497
  sig_peptide 114..191: Von Heijne matrix score 6.80000019073486 seq VFLSLFLIQLLIS/FS
ctcagcacccagggcggtggtaggtcacagtctctgggcgggtctcagtgtccaacactgtagctggtgcctgccaggttcccagtggctggggtcaccaggtctgaagagagatgtgctggctgcgggcatggggccagatcctcctgccagttttcctctccctctttctcatccaattgcttatcagcttctcagagaatggttttatccacagccccaggaacaatcagaaaccaagagatgggaatgaagaggaatgtgctgtaaagaagagttgtcaattgtgcacagaagataagaaatgtgtttggtgtagtgaagaaaaagcatgcaaaaaatactgttttccctatttcggttgtcgattcagttctatatattggttaaactgtaaagttgacatgtttggaatcatgatgcttctactcattgcagtattaattacaggattcgtttggtactgctgcgcctatcacttttacctgcaggatatatgatgaatagataattgraaagagatcctcca

SEQ ID NO: 365 - DNA, 505 bp, Homo sapiens
  CDS 71..496
  sig_peptide 71..142: Von Heijne matrix score 6.5 seq LSICLSAVATATG/AE
  Unsure 77..79: Xaa = Asn or Lys
  Unsure 80..82: Xaa = Arg, Leu, or Trp
gacgaggacscgcctgcgcagaggcggcagcaccaccggggttgactccgggggcgcggcgaggagagacatgaggctgagctggttccgggtcctgacagtactgtccatctgcctgagcgccgtggccacggccacgggggccgagggcaaaaggaagctgcagatcggggtcaagaagcgggtggaccactgtcccatcaaatcgcgcaaaggggatgtcctgcacatgcactacacggggaagctggaagatgggacagagtttgacagcagcctgccccagaaccagccctttgtcttctcccttggcacaggccaggtcatcaagggctgggaccaggggctgctggggatgtgtgagggggaaaagcgcaasykggtgatcccatccgagctagggtatggagagcggggagctcccccaaagattccaggcggtgcaaccctggtgttcgaggtggagctgctcaaaatagagcgacgaactgagctgtaaccagac

SEQ ID NO: 366 - DNA, 539 bp, Homo sapiens
  CDS 65..274
  sig_peptide 65..136: Von Heijne matrix score 6.5 seq ILLTRPACLGSWA/EI
cactgattctttggccatcgctactacaattttagaattgctggcaattttttctgcacactggatggcttcttccaccagtgtctcaacaggacaaatcttgctgacaagacctgcttgcttggggtcctgggctgagatccggtcaccggtgaggaccatctccatcgccagcgacttcccaacagcacgggtgagtctctgggtgccgcccgcacctgggatggttcctattaagatctccggctgtgcaaactgggccttctcaccggcatagatgatatcacacatcatggcaagctcacagcccccgccaaaggcatagccattgacagcagcgatgactggattcttgacctgggtgaggtggtcccagtgcttcaagaacttgctggagtaacagtcctggaaactcaggttctgcatttccttgatatcagctctagtgaaaagggcggtagttggtggtggaaccagaaacggacgccggtgcttkgagcggttcttaaattatatttaaaaagtaactttttgtataa

SEQ ID NO: 367 - DNA, 460 bp, Homo sapiens
  CDS 14..178
  sig_peptide 14..82: Von Heijne matrix score 6.40000009536743 seq LGALSGAAALGFA/SY
ctgttctacagctatggccgggccagctgcagctttccgccgcttgggcgccttgtccggagctgcggccttaggcttcgcttcctacggggcgcacggcgcmaattcccagatgcctacgggaaggagctgtttgacaaggccaacaaacaccacttcttacacagcctggccctgttaggggtgccccattgcagaaagccactctgggctgggttattgctagcttccggaacgaccttattctgcaccagcttttactaccaggctctgagtggagaccccagcatccagactttggcccctgcgggagggaccctgctactcttgggctggcttgccttggctctttgagctcccttttgcttaattactgggttttctgggcagttttttttttaaagagttggagtaagaagaggattaaaaaggaaaggcaaataaaaaaaaaaaaaaaagc

SEQ ID NO: 368 - DNA, 482 bp, Homo sapiens
  CDS 14..178
  sig_peptide 14..82: Von Heijne matrix score 6.40000009536743 seq LGALSGAAALGFA/SY
ctgttctacagctatggccgggccagctgcagctttccgccgcttgggcgccttgtccggagctgcggccttaggcttcgcttcctacggggcgcacggcgcmaattcccagatgcctacgggaaggagctgtttgacaaggccaacaaacaccacttcttacacagcctggccctgttaggggtgccccattgcagaaagccactctgggctgggttattgctagcttccggaacgaccttattctgcaccagcttttactaccaggctctgagtggagaccccagcatccagactttggcccctgcgggagggaccctgctactcttgggctggcttgccttggctctttgagctcccttttgcttaattactgggttttctgggcagttttttttttaaagagttggagtaagaagaggattaaaaaggaaaggcaaataaactttggagtctttgttcatcaaaaaaaaaaaaaaaaa

SEQ ID NO: 369 - DNA, 497 bp, Homo sapiens
  CDS 161..322
  sig_peptide 161..211: Von Heijne matrix score 6.40000009536743 seq LTFAQLLFATVLG/IA
agatgggggtaggagctctccagacagtgtcccctcactcacccccgcggcgcctggcgtcttctcctgggtgttgaagtacaagatttgaagagatttcctgggtgtggagtgtgactttccaaaaccagcttttccttgagctgtatttgttgcagcaatgtttaggagattgacttttgcacaactgctttttgccactgtccttggaattgctggaggagtatatatttttcaaccagtatttgaacagtatgccaaagatcagaaggaattaaaagaaaagatgcagttggtacaagaatcagaagagaagaaaagttaatactacatggagttaggcctggcgcagtggctcacgcctgtaatcccagcactttgggaggccgaggcgggtggatcaggtggtcaggagttcaagaccagcctgaccaacatggtgaaacctgtctctactgaaaatacaaaaatcagccaggcttggtggcatgcgctgt

SEQ ID NO: 370 - DNA, 422 bp, Homo sapiens
  CDS 47..295
  sig_peptide 47..91: Von Heijne matrix score 6.30000019073486 seq LFLSLPVLVVVLS/IV
aaccaagccctccagcaaggattcagagtgcccctccggcctcgccatgaggctcttcctgtcgcttccggtcctggtggtggttctgtcgatcgtcttggaaggcccagccccagcccaggggaccccagacgtctccagtgccttggataagctgaaggagtttggaaacacactggaggacaaggctcgggaactcatcagccgcatcaaacagagtgaactttctgccaagatgcgggagtggttttcagagacatttcagaaagtgaaggataaactcaagattgactcatgaggacctgaagggtgacatcccaggaggggcctctgaaatttcccacaccccagcgcctgtgctgaggactccctccatgtggccccaggtgccaccaataaaaatcctacagaaaactaatata

SEQ ID NO: 371 - DNA, 495 bp, Homo sapiens
  CDS 66..359
  sig_peptide 66..194: Von Heijne matrix score 6 seq FLIYVALLRVSEC/LP
gggcgcgaggcggccaccgtggagagcagagcgcggcggctggaagctgctaagtcagagccgcgatgttccggattgagggcctcgcgccgaagctggacccggaggagatgaaacggaagatgcgcgaggatgtgatctcctccatacggaactttctcatctacgtggccctcctgcgagtcagtgagtgtctcccgggctgtgactgtgataccagcggggagctcaccgacgggcaccccttaactctaaggggtcatcggggccttcgaactgagctgaacggtagcggggagcaaggaggctccatttatcttaaagaaattggacagcatatgaagacaggacatcacatatgaatgcacgatatgaagagcctggttacagtttcgactcctctctgcaagtgaataggcccagaaaggtgtaagagactctttgaatggacataaaattctgcttgttaagaacaagtttggctctggtaactga

SEQ ID NO: 372 - DNA, 515 bp, Homo sapiens
  CDS 115..360
  sig_peptide 115..243: Von Heijne matrix score 5.59999990463257 seq VVSFALIATLVYA/LF
ataaggggacgtctagtgggttgcccgggagggtggcgggagggtcctggaaataatctgtcctctgtcgccgggaactggcgaggtagttccttcgcggtggagagacctggaatggccaaatatcaaggtgaagttcaaagtttgaaactggatgatgattcagttatagaaggagtaagcgaccaagtacttgtggcagttgtggtcagtttcgctttgattgctaccctggtatatgcacttttcagaaatgtacatcaaaacattcacccagaaaaccaggagctagtaagggtacttcgagaacagcttcaaacagaacaggatgcacctgctgactcgacagcagttctacactgacatgtactgtcccatctgcctgcaccaagcctccttcccggtggagaccaactgtggacatcttttttgtggtgcctgcattattgcttactggcgatatggttcatggcttggggcaatcagttgtccaatctgtagacaaacgagacatg

SEQ ID NO: 373 - DNA, 513 bp, Homo sapiens
  CDS 56..352
  sig_peptide 56..139: Von Heijne matrix score 5.5 seq LGYLVLSEGAVLA/SS
ctgaagccggaagctacctatctggtagggagctcccccagcaccgaagactgcgatgacttctgcactgacccaggggctggagcgaatcccagaccagctcggctacctggtactgagtgaaggtgcagtgctggcgtcatctggggacctggagaatgatgagcaggcagccagtgccatctctgagctggtcagcacagcctgcggtttccggctgcaccgcggcatgaatgtgcccttcaagcgcctgtctgtggtctttggagaacacacactgctggtgacggtgtcaggacagagggtgtttgtggtgaagaggcagaaccgaggtcgggagcccattgatgtctgagcctgccggaggcgagggtcggagaagcggattgggtcctgggcctctgtgatgaggcaggcacacctgtcggtcttggcttgctgctagaaactagggccttctgctcgcccacctcccaccccctacctggacgggcccaggcttggggactctga

SEQ ID NO: 374 - DNA, 632 bp, Homo sapiens
  CDS 2..559
  sig_peptide 2..46: Von Heijne matrix score 5.30000019073486 seq VMAASMARGGVSA/RV
  Unsure 488..490: Xaa = Gln or Glu
gatgcatgtcatggccgcctccatggcccggggaggcgtgagtgccagggttctactgcaggctgccaggggcacctggtggaacagacctgggggcacttccgggtcgggggagggggtggcgctggggacaaccagaaagtttcaagcgacaggctcgcgcccggctggagaggaggacgcgggcggcccggagcggcccggggacgtggtgaacgtggtgttcgtagaccgctcaggccagcggatcccagtgagtggcagagtcggggacaatgttcttcacctggcccagcgccacggggtggacctggaaggggcctgtgaagcctccctggcctgctccacctgccatgtgtatgtgagtgaagaccacctggatctcctgcctcctcccgaggagagggaagacgacatgctagacatggcccccctcctccaggagaactcgcggctgggctgccagattgtgctgacaccggagctgsaaggagcggaattcaccctgcccaagatcaccaggaacttctacgtggatggccatgtccccaagccccactgacatgaacacctggaccattccacattgccatggccccagggccagattgagggaatagcaggtgcagcct

SEQ ID NO: 375 - DNA, 503 bp, Homo sapiens
  CDS 59..427
  sig_peptide 59..202: Von Heijne matrix score 5.19999980926514 seq LLMLLLFLSELQY/YL
aggccggaagagggagtctgtaggggcgggccgggcgtcccctttccggccggtccccatggaggcgctggggaagctgaagcagttcgatgcctaccccaagactttggaggacttccgggtcaagacctgcgggggcgccaccgtgaccattgtcagtggccttctcatgctgctactgttcctgtccgagctgcagtattacctcaccacggaggtgcatcctgagctctacgtggacaagtcgcggggagataaactgaagatcaacatcgatgtactktttccgcacatgccttgtgcctatctgagtattgatgccatggatgtggccggagaacagcagctggatgtggaacacaacctgttcaagcaacgactagataaagatggcatccccgtgagctcagaggctgagcggcatgattaatgcaggacaccagtggaaccaacataatttgctataggactggatgtggagtggaggagagcaaagtcatggt

SEQ ID NO: 376 - DNA, 521 bp, Homo sapiens
  CDS 145..375
  sig_peptide 145..231: Von Heijne matrix score 5.09999990463257 seq LLLKLQRLPQAEP/VE
  Unsure 337..339: Xaa = Arg or Gln
gacaaacttgttctgcgggctgcggatgggtgcgagggtggaatctcggtgctgcgacgagtgtggggccarccgtggaggctccaggtgttctctctgccccagcagagcccggcaggagccccaacaggaagccagcgcggcatggctgccaccgacttcgtgcaggagatgcgcgccgtgggcgagaggctgctgctcaagctgcagagactgccccaggctgagcccgtggagatcgtggccttctcagtcatcatccttttcacagctactgttctgctgttgctgctgatagcctgcagctgctgctgcactcactgctgctgccctgagcrgagaggcaggaaggtccaggtgcagccgacaccaccatgacggackggcgatggctgaggagaagctggagaggagatggccaatgccatgacacaggccatcagcctggccctgcagcccttacccctcaagacsaggctccctggcccagctctggcccagccaggtacctggacactgac

SEQ ID NO: 377 - DNA, 461 bp, Homo sapiens
  CDS 17..337
  sig_peptide 17..97: Von Heijne matrix score 4.90000009536743 seq VLSTLSLVQFSPS/GR
actttagctgctgcagatgctgtttgaagaagctctgcccctcagctgctctgatcctgtgcttagcactcttagcctggtgcagttcagccccagtggaaggacccaggacctgctctctccaggggtggagaacctgtcggtgctggacgtgtcccctctgggcttggcctgctgtctgctcactctcaccatgtcctgcccagggcctgaccctcctgaggggcccgggacccagcgtgtgtggcaaggggctctacggatcctacagctcccaggagccccagatggggtttcaccatatcagccagtctggtctcgaactcctgacctcaagtgattcgccagcctcgtcctcccaaagtgctgggattacagatgtgagccaccatgcccatggagaatgtattacttttgtaatttaaaaaataatagtaataaaataaagatctttacaatgt

SEQ ID NO: 378 - DNA, 495 bp, Homo sapiens
  CDS 148..483
  sig_peptide 148..264: Von Heijne matrix score 4.80000019073486 seq IILFSAIVGFIYG/YV
  Unsure 43: n = a, g, c or t
  Unsure 112: n = a, g, c or t
  Unsure 122: n = a, g, c or t
  Unsure 154: n = a, g, c or t
  Unsure 154..156: Xaa = Gln, Glu, Lys, or *
cctaatcgaaaattcgctctcccgggcttagaaggcccggctnctgacgcgcagtgccagaccttacccctcacggtccttaagtctcggtcgccctcgcctcgcagcctgncacccgcgmncagctgcccgcctcctcagccagccatgctgnagcatctgagctcgctgcccacgcagatggattacaagggccagaagctagctgaacagatgtttcagggaattattcttttttctgcaatagttggatttatctacgggtacgtggctgaacagttcgggtggactgtctatatagttatggccggatttgctttttcatgtttgctgacacttcctccatggcccatctatcgccggcatcctctcaagtggttacctgttcaagcacagacgacaagaaaccaggggaaagaaaaattaagaggcatgctaaaaataattgaggttttcatgattcagcacctgcttttgtttctgtgagatgagcta

SEQ ID NO: 379 - DNA, 541 bp, Homo sapiens
  CDS 60..368
  sig_peptide 60..122: Von Heijne matrix score 4.69999980926514 seq ALRSLNLAPPTVA/AP
acagtcaacgtcatctaggagcaccgagcagcttggctaaaagtaagggtgtcgtgctgatggccctgtgcgcactgacccgcgctctgcgctctctgaacctggcgcccccgaccgtcgccgcccctgccccgagtctgttccccgccgcccagatgatgaacaatggcctcctccaacagccctctgccttgatgttgctcccctgccgcccagttcttacttctgtggcccttaatgccaactttgtgtcctggaagagtcgtaccaagtacaccattacaccagtgaagatgaggaagtctgggggccgagaccacacaggtgctggaaacgtgcgtagcaacagtaggccgagtatccaacgttgatcataacaaacgggtcattggcaaggcaggtcgcaaccgctggctgggcaagaggcctaacagtgggcggtggcaccgcaaggggggctgggctggccgaaagattcggccactaccccccatgaagagttacgtgaagctgccttctgcttctgccaaagctgatatcc

SEQ ID NO: 380 - DNA, 545 bp, Homo sapiens
  CDS 80..355
  sig_peptide 80..124: Von Heijne matrix score 4.59999990463257 seq VLAGSLLGPTSRS/AA
cttttcctttgttccagggctggagcggctctgggctccggaatcgcccgcagccggtactgcgggacccactgcggatatggctgtcttggctggatccctgttgggccccacgagtaggtcggcagcgttgctgggtggcaggtggctccagccccgggcctggctggggttcccagacgcctggggcctccccaccccgcagcaggcccggggcaaggctcgcgggaatgagtatcagccgagcaacatcaaacgcaagaacaagcacggctgggtccggcgcctgagcacgccggccggcgtgcaggtcatccttcgccgaatgctcaagggccgcaagtcgctgagccattgaggatcgcgacgcagtcggcgggaccctcatggaagcatcgccctcgcctcggaccttgcctggcgctatttttgcagggagctggggagcaggaacgcctcggacctgagtgctctccatattgtggggttgaagtctggatgggagcttgccaagtccctttttaggctttttaattaggaagcat

SEQ ID NO: 381 - DNA, 498 bp, Homo sapiens
  CDS 137..397
  sig_peptide 137..253: Von Heijne matrix score 4.59999990463257 seq LQGARVLLTGANA/GV
ggggtgcggtcggggacccggcaggaggcggccgagaagagaggaccgtgggggcgttcgcgtggctcccagcccgggaccccacccccgctggacagtgggggaaactgaggcctgagcgggcccacacaggaccatgaaggtgcttctcctcacagggctgggggccctgttcttcgcctattattgggatgacaacttcgacccagccagcctccagggagcgcgagtgctgctgacaggggccaacgctggtgttggtgaggagctggcctatcactacgcgcgtctgggctcccacctggtgctcactgcccacactgaggctctcctgcagaaggcacggtggctcacgcttgtagtcagcactttgggaggccgaggaaagtggatcacctgaggtcaggagttcaagaccagcctggccaacatggcgaaacctggtctctactaagaagacaaaaattaaggccaggcatggtggctcatgcctgtaat

SEQ ID NO: 382 - DNA, 459 bp, Homo sapiens
  CDS 43..417
  sig_peptide 43..87: Von Heijne matrix score 4.59999990463257 seq LLTHNLLSSHVRG/VG
  Unsure 385..387: Xaa = Asn or Thr
acctttttccggttccggcctggcgagagtttgtgcggcgacatgaaactgcttacccacaatctgctgagctcgcatgtgcggggggtggggtcccgtggcttccccctgcgcctccaggccaccgaggtccgtatctgccctgtggaattcaaccccaacttcgtggcgcgtatgatacctaaagtggagtggtcggcgttcctggaggcggccgataacttgcgtctgatccaggtgccgaaagggccggttgagggatatgaggagaatgaggagtttctgaggaccatgcaccacctgctgctggaggtggaagtgatagagggcaccctgcagtgcccggaatctggacgtatgttccccatcagccgcgggatcccmamcatgctgctgagtgaagaggaaactgagagttgattgtgscaggcgccagtttttcttgtyatgactgtgtat

SEQ ID NO: 383 - DNA, 533 bp, Homo sapiens
  CDS 82..237
  sig_peptide 82..147: Von Heijne matrix score 4.5 seq FFLLITIALGTKT/ES
  Unsure 223..225: Xaa = Asn or Ile
aawtttctcaacaattcctcaccgcagagcctctgaagctcccaccaggccagctctcctcccacaacagcttcccacagcatgaagatctccgtggctgccattcccttcttcctcctcatcaccatcgccctagggaccaagactgaatcctcctcacggggaccttaccacccctcagagtgctgcttcacctacactacctacaagatcccgcgtcagawttatggattactatgagaccaacagccagtgctccaagcccggaattgtcttcatcaccaaaaggggccattccgtctgtaccaaccccagtgacaagtgggtccaggactatatcaaggacatgaaggagaactgagtgacccagaaggggtggcgaaggcacagctcagagacataaagagaagatgccaaggccccctcctccacccaccgctaactctcagccccagtcaccctcttggagcttccctgctttgaattaaagaccactcatgctctccaaaaaaaaaaaaaaaaggtcaaaagct

SEQ ID NO: 384 - DNA, 472 bp, Homo sapiens
  CDS 92..307
  sig_peptide 92..217: Von Heijne matrix score 4.40000009536743 seq LRLEVAAAPGTPA/QP
aaaagaaattcccgggcccggccagcctgtgccgctgttatgaggagaagcaaagccccttgcagaagcacttgcggtctgcagcctacgcatgaataggttggcaggtgtgggctggcgggtggactacaccctgagctccagcctgctgcaatccgtggaagagcccatggtgcacctgcggctggaggtggcagctgccccagggaccccagcccagcctgttgccatgtccctctcagcagacaagttccaggtcctcctggcagaactgaagcaggcccagaccctgatgagctccctgggctgaggagaagggtgttccaggcctgtgtggagccgccctgcccgtatggagtcacgccctctgaactgctcttcgggaggcagccctggttctaggatgctgaggccctggcccggactctggcctcccagatccccagctgcctcacttctctcttgagaactt

SEQ ID NO: 385 - DNA, 514 bp, Homo sapiens
  CDS 113..364
  sig_peptide 113..172: Von Heijne matrix score 4.30000019073486 seq SLLLSLPPHQGLT/FS
ttttttacatggtgttcccacagctgggaggacacccacatggtcggcgtgcaggatatttcgctggaccctagaaaagccaccacgacctgtgggccatgatgctaccccaatggctgctgctgctgttccttctcttcttctttctcttcctcctcaccaggggctcactttctccaacaaaatacaaccttttggagctcaaggagtcttgcatccggaaccaggactgcgagactggctgctgccaacgtgctccagacaattgcgagtcgcactgccggagaaggggtccgagggcagtctgtgtcaaacgcagctgccagctactccatgcttcctgccttcgaatacggtgagaacgtgaagtcatgagctgctgctaaggcatgtggcaaccttgaagagaaggtcaagagctaccagccaccaaaagaatgccagcacttcctgtgtctttgctttggattcatgagaaatatacgttcctatttgcttcaaaaaaaaaaaaaaw

SEQ ID NO: 386 - DNA, 508 bp, Homo sapiens
  CDS 83..244
  sig_peptide 83..139: Von Heijne matrix score 4.19999980926514 seq LLILSKVLDDTFQ/SV
actgctatagcgatataactcagatgttctcaggacagcaagtttacatgtgaatagagagggagggacgtgttaggaagacatgaaattcaattttgtacttttgatactttccaaagttctagatgacactttccaaagtgtcaagaaatggttaaattattttcagtttactttaagaaatggtttaatgtggccaggtgcggtggctcatgcctgtaatcccagcactggctcacgcctgtaatcccagcactttgggagtccgaggtgggcagatcatgaggtcaggagatcgagaccatcctggctaacatggtgaaaccccgtctctactaaaaatacaaaaaaattagccaggcatggtggcgggcgcctgtagtcccagctactcgggaggctgaggcaggagaatggcgtgaacctgggaggcggagcttacagtgagccgagatcgcgccactgcactccagcctgggcgacagagcgagactctgttcaaaaaaaa

SEQ ID NO: 387 - DNA, 505 bp, Homo sapiens
  CDS 55..327
  sig_peptide 55..111: Von Heijne matrix score 4.19999980926514 seq FVLLLSEIVSISA/LS
  Unsure 196..198: Xaa = Met or Thr
ttgtctttggtagtttttttgcactaacttcaggaaccagctcatgatctcaggatgtatggaaaaataatctttgtattactattgtcagaaattgtgagcatatcagcattaagtaccactgaggtggcaatgcacacttcaacctcttcttcagtcacaaagagttacatctcatcacagacaaatggagaaaygggacaacttgtccatcgtttcactgtaccagctcctgtagtgataatactcattattttgtgtgtgatggctggtattattggaacgatcctcttaatttcttacagtattcgccgactgataaaggcatgaggatgtggcctgcatgctgcctgatcttgcctagaaccggctgcacctgctgttctcttgtttatgcaaactggctgcacctgctattcctttgcttatgcccctacccctggctatcctaattccctgttctcctgcctcactattactgtattctctacttctaaataaaaat

SEQ ID NO: 388 - DNA, 775 bp, Homo sapiens
  CDS 395..736
  sig_peptide 395..490: Von Heijne matrix score 4.19999980926514 seq LLGSGLFVFSLTA/FN
atgatgggtaacaggaccggtgggstccccaggaagtcctagagggggtcggggtttgggtggacaagctttcctcgtcctctcccgacagagctgacgtgtcctgggttccaccgggagcgggcatttccaccggacgggagggttcggggtgtccggggctggggaatacgtaggggttgccgcgcggtgtggggagttggggcgtgtggctgcagtcccgggagttcttggagggggtcggcccaccgagcttccggaccggctgatctgcccgtagcttgccggaggagggcggastgactctccgtcccttctcccatcccctccagtggtgggtacgggcacctcgctggcgctctcctccctcctgtccctgctgctctttgctgggatgcagatgtacagccgtcagctggcctccaccgagtggctcaccatccagggcggcctgcttggttcgggtctcttcgtgttctcgctcactgccttcaataatctggagaatcttgtctttggcaaaggattccaagcaaagatcttccctgagattctcctgtgcctcctgttggctctctttgcatctggcctcatccaccgagtctgtgtcaccacctgcttcatcttctccatggttggtctgtactacatcaacaagatctcctccaccctgtaccaggcagcagctccagtcctcacaccagccaaggtcacaggcaagagcaagaagagaaactgaccctgaatgttcaataaagttgattctttgtaaaaa

SEQ ID NO: 389 - DNA, 466 bp, Homo sapiens
  CDS 166..324
  sig_peptide 166..204: Von Heijne matrix score 4.09999990463257 seq MAVAFVLSLGVAA/LY
attctgcgcctgcgcgcggctacagcacggttcgtttttcctttagtcaggaaggacgttggtgttgaggttagcatacgtatcaaggacagtaactaccatggctcccgaagttttgccaaaacctcggatgcgtggccttctggcaggcgtctgcgaaatcatatggctgtagcattcgtgctatccctgggggttgcagctttgtataagtttcgtgtggctgatcaaagaaagaaggcatacgcagatttctacagaaactacgatgtcatgaaagattttgaggagatgaggaaggctggtatctttcagagtgtaaagtaatcttggaatataaagaatttcttcaggttgaattacctagaagtttgtcactgacttgtgttcctgaactatgacacatgaatatgtgggctaagaaatagttcctcttgataaataaacaattaacaaatacttttga

SEQ ID NO: 390 - DNA, 522 bp, Homo sapiens
  CDS 94..417
  sig_peptide 94..213: Von Heijne matrix score 4 seq VTAPSMVAPVTFA/SI
ctgtaatctctgcgaaagcttccaggttcgctcatcgtaggtcactggaaaaaattgtagcattgctaaagagtatttcagagaaaattttgcatgcaaaaatttaggaagatgagtgaaactcatcattctgtaatctctgtgaaagcttccagtccctggctatcttcttcagtgactgctccatccatggtagccccagtcacttttgcatctattgtagaagaagaactacaacaagaagcagctcttattagaagtcgagaaaaaccgttggctctgattcagattgaggagcatgccatacaagatttattggttttctatgaggcatttggcaaccctgaagagtttgtcattgttgaaaggacaccgcagggaccactggcagtacctatgtggaataagcatggatgctagttcactgtggagttgagatgcattttacataattatgagtttgttcatataaagaaagctgtggaaaagagtcttagagatttgaatatcgtctaaatagat

SEQ ID NO: 391 - DNA, 409 bp, Homo sapiens
  CDS 9..389
  sig_peptide 9..149: Von Heijne matrix score 3.90000009536743 seq LSSDLQQVGGASA/RI
  Unsure 8: n = a, g, c or t
  Unsure 403: n = a, g, c or t
  Unsure 21..23: Xaa = Leu or Met
  Unsure 24..26: Xaa = Lys or Thr
  Unsure 33..35: Xaa = Tyr or *
  Unsure 69..71: Xaa = Leu or Met
  Unsure 84..86: Xaa = Cys or *
  Unsure 156..158: Xaa = Gln or Lys
  Unsure 319..321: Xaa = Ile or Leu
  Unsure 336..338: Xaa = Leu or Met
tgggagtnatgttcacgcctmtgamagtgaaatamgcgtactacgacactgaacgcatcggagttgacmtgatcatgaagacctgmtttagccccaacagagtgattggactctcaagtgacttgcagcaagtaggaggggcatcagctcgcatcmaggatgccctgagtacagtgttgcaatatgcagaggatgtactgtctggaaaggtgtcagctgacaatactgtgggccgcttcctgatgagcctggttaaccaagtaccgaaaatagttcccgatgactttgagaccatgctcaacagcaacatcaatgacmttttgatggtgacctacmtggccaacctcacacagtcacagattgcactcaatgaaaaacttgtaaacctgtgaatggaccccangcagta

SEQ ID NO: 392 - DNA, 431 bp, Homo sapiens
  CDS 60..314
  sig_peptide 60..155: Von Heijne matrix score 3.79999995231628 seq LAHIQALISGIEA/QL
  Unsure 381: n = a, g, c or t
cataagaacagggaggttagaagtagggtcttgagattgagctgcagtcacagctgagcatgaaagctgccttggaagacacactggcagaaacggaggcgcgctttggagcccagctggcgcatatccaggcgctgatcagcggtattgaagcccagctgggcgatgtgcgagctgatagtgagcggcagaatcaggagtaccagcggctcatggacatcaagtcgcggctggagcaggagattgccacctaccgcagcctgctcgagggacaggaagatcactacaacaatttgtctgcctccaaggtcctctgaggcagcaggctctggggcttctgctgtcctttggagggtgtcttctgggtagagggatgggaangaagggacccttacccccggctcttctcctgacctgccaataaaaattta

SEQ ID NO: 393 - DNA, 551 bp, Homo sapiens
  CDS 232..534
  sig_peptide 232..306: Von Heijne matrix score 3.70000004768372 seq AKTCLVLCSRVLS/VI
tatcactgttacgaaccaaggatttacagatcactggcaaaaattctgagaactttcacaccagtatactgtccaagcccattaagtggcatcacacctctcttttatgtagctcagacaagacagtctaatatcttcaaaatactactgcaatatggaatcttagaaagagaaaaaaaccctatcaacattgtcttaacaatagtactctacccttcgagagtaagagtaatggttgatcgtgaattggctgacatccatgaagatgccaaaacatgtttggtactatgttccagagtgctttctgtcatttcagtcaaggaaataaagacacagctgagtttaggaagacatccaattatttcaaattggtttgattacattccttcaacaagatacaaagatccatgtgaactattacatctttgcagactaaccatcaggaatcaactattaaccaacaatatgctcccagatggaatattttcacttctaattcctgctcgtctacaaaactatctgaatttagaaatctaacatacgtcagtgtc

SEQ ID NO: 394 - DNA, 529 bp, Homo sapiens
  CDS 78..281
  sig_peptide 78..218: Von Heijne matrix score 3.70000004768372 seq PLLSLHSRGGSSS/ES
ttttttgcgaacggcgagcagcggcgcgcgcggagagacgagcggaggttttcctggtttcggaccccagcggccggatggtgaaatcctccctgcagcggatcctcaatagccactgcttcgccagagagaaggaaggggataaacccagcgccaccatccacgccagccgcaccatgccgctcctaagcctgcacagccgcggcggcagcagcagtgagagttccagggtctccctccactgctgtagtaacccgggtccggggcctcggtggtgctcctgatgcccctcacccacccctgaagatcccaggtgggcgagggaatagtcagagggatcacaatctttcagctaacttattctactccgatgatcggctgaatgtaacagaggaactaacgtccaacgacaagacgaggattctcaacgtccagtccaggctcacagacgccaaacgcattaactggcgaacagtgctgagtggcggcastcctacatcgagatcccgggcggcgcgctgccgagggg

SEQ ID NO: 395 - DNA, 491 bp, Homo sapiens
  CDS 80..283
  sig_peptide 80..220: Von Heijne matrix score 3.70000004768372 seq PLLSLHSRGGSSS/ES
  Unsure 245..247: Xaa = Cys or Trp
aktttgcgaacggcgagcagcggcggcggcgcggagagacgcagcggaggttttcctggtttcggaccccagcggccggatggtgaaatcctccctgcagcggatcctcaatagccactgcttcgccagagagaaggaaggggataaacccagcgccaccatccacgccagccgcaccatgccgctcctaagcctgcacagccgcggcggcagcagcagtgagagttccagggtctccctccactgstgtagtaacccgggtccggggcctcggtggtgctcctgatgcccctcacccacccctgaagatcccaggtgggcgagggaatagtcagagggatcacaatctttcagctaacttattctactccgatgatcggctgaatgtaacagaggaactaacgtscaacgacaagacgaggattctcaacgttcagtccaggctcacaggaacgccaaacgcattaactgccgaacagtgctgagtggcg

SEQ ID NO: 396 - DNA, 503 bp, Homo sapiens
  CDS 9..395
  sig_peptide 9..56: Von Heijne matrix score 3.59999990463257 seq LLLLLRALRRGPG/PG
aggccaacatggccgtgctgctgctgctgctccgtgccctccgccggggtccaggcccgggtcctcggccgctgtggggcccaggcccggcctggagtccagggttccccgccaggcccgggagggggcggccgtacatggccagcaggcctccgggggacctcgccgaggctggaggccgagctctgcagagcttacaattgagactgctaacccctacctttgaagggatcaacggattgttgttgaaacaacatttagttcagaatccagtcagactctggcaacttttaggtggtactttctattttaacacctcaaggttgaagcagaagaataaggagaaggataagtcgaaggggaaggcgcctgaagaggacgaaggtatattcatctgatgttcttcagtcagtagctgcctctggatgtctttacatttctgtttwccttttagcaaggtgaaaccagtctggacaatggggagatgggccgggtgcagtggc

SEQ ID NO: 397 - DNA, 517 bp, Homo sapiens
  CDS 93..419
  sig_peptide 93..191: Von Heijne matrix score 3.59999990463257 seq LAVFQMLKSMCAG/QR
  Unsure 255..257: Xaa = Glu or Gly
  Unsure 315..317: Xaa = Arg or Pro
  Unsure 318..320: Xaa = Asn, Asp, Gly, or Ser
gaaaaaaagcgaaggccggccgggcggggaagggaaatggcgaggcaggagtgcgggggagggastggtccttagctgaatgcgcctgcgttatggcggcctccggcgccccaaggatcctggtggacctgctgaagctgaacgtggcccccctcgccgtcttccagatgctcaagtccatgtgtgccgggcagaggctagcgagcgagccccaggaccctgcggccgtgtctctgcccacgtcgagcgtgcccgrgacccgagggagaaacaaaggcagcgctgccctcgggggagcattggccctggcggaacsmrrcagccgcgaaggatccagccagaggatgccacgccagcccagcgctaccaggctgcccaaggggggcgggcctgggaagagccctacacggggcagcacctaggatggggcagagacttgttgcatctttgtccccagcaaaggctacatgttacctccttcaattgataataaacctttctgagatgagagggtcca

SEQ ID NO: 398 - DNA, 507 bp, Homo sapiens
  CDS 78..386
  sig_peptide 78..185: Von Heijne matrix score 3.59999990463257 seq RALSTFLFGSIRG/AA
aagtgcgcagacgcaggggtcggcgccgggtgagagcgtgcggccgggtaagggcgtgtggccggattcaccacaacatggcaaatctttttataaggaaaatggtgaaccctctgctctatctcagtcgtcacacggtgaagcctcgagccctctccacatttctatttggatccattcgaggtgcagcccccgtggctgtggaacccggggcagcagtgcgctcacttctctcacccggcctcctgccccatctgctgcctgcgctggggttcaaaaacaagactgtccttaagaagcgctgcaaggactgttacctggtgaagaggcggggtcggtggtacgtctactgtaaaacccatccgaggcacaagcagagacagatgtagaccctttccctccagagtcacgcacatactcgtcatcgcatcacttgggagaatggttgtatcttatggaaggaattatcacatcaaggagtcaggggamagtgactgggaagcaaac

SEQ ID NO: 399 - DNA, 493 bp, Homo sapiens
  CDS 58..315
  sig_peptide 58..165: Von Heijne matrix score 3.59999990463257 seq SVSLSGFTVGTLS/ET
ctgtgggagaggccaggatgctgcattaggcacaggataacctgggaacccaggcacatgggtcctgctctccgaagtctgcaagtcaagaagggaacagagcacgccgaccctctccctttcccctctgtctctcttagtggctttacagtgggtaccctgtcagaaaccagcactgggggccctgccacccccacatggaaggagtgtcctatctgtaaggagcgctttcctgctgagagtgacaaggatgccctggaggaccacatggatggacacttctttttcagcacccaggaccccttcacctttgagtgatcttactccctcgtacatgcacaaatacacactcatgcacacacacactcacacacatgcatacacttaggtttcatgcccattttctatcacactgggctccatgatattctgttccctaagaactgcttctgtgtgccctgttttcatcccaagatttctcacttcatcctct

SEQ ID NO: 400 - DNA, 769 bp, Homo sapiens
  CDS 506..661
  sig_peptide 506..595: Von Heijne matrix score 3.5 seq VKLLLKMVSSATT/ER
cttggctcttaaagccaggttgagggttatgtgtttttattcttttawatctccttttcacttaggcttggcaactagttcattgaaacagagccaacaagaatgagtgagtcactcagtgatatgaagcaagctgtggtcatttatctactaccttccatacctacttcctaggtttgataagtagtgtttgtagtgtagttgtcagtaacttttctcagcttacataagtttatgtggaattcatttacaaatgtgtgattattacgatagatgttattttataaatttcaaggttctttaatacagcatggacatgtttctaaatcaataaatatagcttamccacagactttttatgggatgtaaagtatgtattacaacaggtaaatccatttctctgttttgggaaagcaggttaatgttttgtttgttttgttgctgcatataatgttgcactatatatatatkctaatgcagttggtctcctaatyctacaggataaatgtctagctgtggcattgttggatcatcagtttcgtttcagttagatgctgtgaaattgctcttgaaaatggtgtcctctgccaccacagaacggtgttgtaatggaagtgccaattttcataaaaacttgtgtgcaacaggtattaagaatttttgaggtcgggcgcagtagctcacgcctgtaatcccagcactttgggaggcctaggcaggtggatcacctgaggtcaggagttccagaccagcctgaccaacatggtga

SEQ ID NO: 401 - DNA, 646 bp, Homo sapiens
  CDS 76..621
attacgagattggcttggattctgtcggatggacttggggctagctgcggcggggctggaggaggccagataaccatgtcagccacagttgtagatgcagttaatgctgcacccctatcggggtccaaagaaatgagtttggaagaaccaaagaagatgaccagagaggactggagaaagaagaaggagctagaagaacagcgaaaattgggcaatgctcctgcagaagttgatgaagaaggaaaagacatcaacccccatattcctcagtatatttcttcagtgccatggtatattgatccttcaaaaagacctactttaaaacaccagagaccacaaccagaaaaacaaaagcagttcagctcatctggagaatggtacaagaggggtgtaaaagagaattccataattactaagtaccgcaaaggagcatgtgaaaattgtggggccatgacacacaaaaagaaagactgctttgagagacctaggcgagttggagccaaatttacaggtactaatatagctccagatgaacatgtccagcctcaactgatgtttgactatgatgggaagagggatcggtggaatggctacaatccagaagaacacatgaaaattgtttgaagagtatgcaaagtgatttggc

SEQ ID NO: 402 - DNA, 484 bp, Homo sapiens
  CDS 29..469
acttggcgagtgagacgctgatgggaggatggacgtactggtgtctgagtgctccgcgcggctgctgcagcaggaagaagagattaaatctctgactgctgaaattgaccggttgaaaaactgtggctgtttaggagcttctccaaatttggagcagttacaagaagaaaatttaaaattaaagtatcgactgaatattcttcgaaagagtcttcaggcagaaaggaacaaaccaactaaaaatatgattaacattattagccgcctacaagaggtctttggtcatgcaattaaggctgcatatccagatttggaaaatcctcctctgctagtgacaccaagtcagcaggccaagtttggggactatcagtgtaatagtgctatgggtatttctcaggtgatgtattgtcatgactcttggctgtttgatttttttaagtattattatcatcattgccatttacagaaataatactattacaag

SEQ ID NO: 403 - DNA, 345 bp, Homo sapiens
ctttctccagctcaagcgtctggtatttggtgtagggacagcgctttttccgggtggagcgagcgtggatccagttcgcggcggggttgtttgggtcaagttgctgctgctgctgcggctgcgaatgctgcttctcctcctccttcagcgaacagcctgggatcgggtggtcgctgcaagctgagggctccgacgagccgcccgtcccagtcgcggccccgatccctgccccaggcccggttccccccgtcgccgctgccgccttctcctgcaggaacgagttgcacatgttactgcttcctactaataaatgctgacctgatcaaatggagcccaaaaraaaaa

SEQ ID NO: 404 - DNA, 432 bp, Homo sapiens
accaggactccaaaatggcgtcagttgtaccagtgaaggacaagaaacttctggaggtcaaactgggggagctgccaagctggatcttgatgcgggacttcagtctagtggcattttcggagcgtttcaaagaggttactaccggtactacaacaagtacatcaatgtgaagaaggggagcatctcggggattaccatggtgctggcatgctacgtgctctttagctactccttttcctacaagcatctcaagcacgagcggctccgcaaataccactgaagaggacacactctgcacccccccaccccacgaccttggcccgagcccctccgtgagaacacaatctcaatcgttgctgaatcctttcatatcctaataggaattaacctccaaataaaacatgactggtacgyraaaaaaaaaaaaaaaag

SEQ ID NO: 405 - DNA, 428 bp, Homo sapiens
actccgccttccacgtgcacccactgcctcttcccttctcgcttgggaactctagtctcgcctcgggttgcaatggaccccaactgctcctgtgccgctgcaggtgtctcctgcacctgcgccagctcctgcaagtgcaaagagtgcaaatgcacctcctgcaagaagagctgctgctcctgctgccctgtgggctgtgccaagtgtgcccagggctgcatctgcaaaggggcatcggagaagtgcagctgctgcgcctgatgtcgggacagccctgctcccaagtacaaatagagtgacccgtaaaatccaggattttttgttttttgctacaatcttgacccctttgctacattcctttttttctgtgaaatatgtgaataataattaaacacttagacaaaaaaaaaaaaaaaaggtcaaaagct

SEQ ID NO: 406 - DNA, 391 bp, Homo sapiens
  CDS 196..390
  sig_peptide 196..279: Von Heijne matrix score 5.90000009536743 seq IILLLLKIWKSRS/CA
ctcttcccggctccagctccgccgccagctccagcctttgctccccctcccaaagtcccctccccggagcggagcgcacctagggtccctcttccgtccccccagcccagctacccgttcagaccagcagcctcggggggcacccccccgccagcctgcctccctcccgctcagccctgccagggttccccagccatgaatctcttccgattcctgggagacctctcccacctcctcgccatcatcttgctactgctcaaaatctggaagtcccgctcgtgcgccgcccacccccagcttcctctctccttctgtctgtctgtctgtctgtctgtctctctctctctctctgtctctctctctctctctttctctgtctcaaaaaaaaaat

SEQ ID NO: 407 - DNA, 500 bp, Homo sapiens; identical to SEQ ID NO: 88
  CDS 81..500
  sig_peptide 81..200: Von Heijne matrix score 5.19999980926514 seq LLMRALHLLKSGC/SP

SEQ ID NO: 408 - DNA, 497 bp, Homo sapiens
  CDS 35..496
  Unsure 437..439: Xaa = Asn, His, Pro, or Thr
  Unsure 440..442: Xaa = Gln or Pro
  Unsure 443..445: Xaa = Ile or Leu
  Unsure 449..451: Xaa = Arg or Pro
tcctaatcgaaawctcttctgaggatccggcaagatggcagaagtagagcagaagaagaagcggaccttccgcaagttcacctaccgcggcgtggacctcgaccagctgctggacatgtcctacgagcagctgatgcagctgtacagtgcgcgccaggcggcggctgaaccggggcctgcggcggaagcagcactccctgctgaagcgcctgcgcaaggccaagaaggaggcgccgcccatggagaagccggaagtggtgaagacgcacctgcgggacatgatcatcctacccgagatggtgggcagcatggtgggcgtctacaacggcaagaccttcaaccaggtggagatcaagcccgagatgatcggccactacctgggcgagttctccatcacctacaagcccgtaaagcatggccggcccggcatcggggcmmccmamtcctccsgcttcatccmtctcaagtaatggctcagctaataaaggcgcacatga

SEQ ID NO: 409 - DNA, 304 bp, Homo sapiens
  CDS 110..304
  Unsure 296..297: n = a, g, c or t
  Unsure 296..298: Xaa = Ala, Arg, Gln, Glu, Gly, Ile, Leu, Lys, Pro, Thr, Ser, Val, or *
acgtacggcagggcggggtcggcccgcagtggccagctgggagctacgagcgcggasttgcgcagaagacccccatcagggtgcggggtgcagttgcggctccagggccatggcggaggagcagggccgggaacgggactcggttcccaagccgtcggtgctgttcctccacccagacctgggcgtgggcggcgctgagcggctggtgctcttgccttttcccactgagagaaggctgctcttttgtactgccccccgctcattaaacagcctccccctaaaaaaaaaaaaaattnnaaaaagc

SEQ ID NO: 410 - DNA, 553 bp, Homo sapiens
  CDS 155..553
aatagtgagcggcagacagaggggtggccagtttgttgttttacctaaaaggtgttttccacatggagtgggactgagaggcacaggtggctgaggggacccgcctgggacgtgaggcgcaggtcctcggccccttcatctgtcagctgcagcaatggaatacgtgctggaagtgaagaactctccgcggcacctcctgaagcaattcacagtgtgtgacgttcctctgtatgacatttgtgactacaacgtctccagagaccgatgccaggagctcgggtgctgcttctacgaaggcgtctgctacaagaaagcggttcccatttacatccacgtgttctctgccttgattgtgatcatagctggggccttcgtcatcaccatcatctacagagtcattcaggagagcaggaaagaaaaggccatccctgtgtatgtcgcgctgccacagaagtccagcgaaaaggcggagttggcctcatccagcagcaagttagggctgaagctgcgagtcctgggcctcaaagtgctgggcctcgatgagagtgacgag

SEQ ID NO: 411 - DNA, 470 bp, Homo sapiens
  CDS 23..469
gggttcccgttccccgcggascatgcggtacaacgagaaggagctgcaggctctgtcccggcagccggccgagatggcggccgagctgggcatgaggggccccaagaagggcagcgtgctgaagcggcggctggtgaagctggtggtgaatttcctcttctactttcggacagacgaggccgagcccgtcggagccctgctgctggagcgctgcagagtcgtccgggaagagcccggcaccttctccatcagcttcattgaggaccctgagaggaagtatcactttgagtgcagcagcgaggagcagtgtcaggagtggatggaggctctgcgtcgggccagctacgagttcatgcggagaagcctcatcttctacaggaacgaaatccggaaggtgacgggcaaggaccccctggaacagttcggcatatccgaggaggccaggttccagctgagtggcttgcaggcgt

SEQ ID NO: 412 - DNA, 486 bp, Homo sapiens
  CDS 211..486
agattcttaactacgtgtcttacagcaaagttgcccatgggaacaaaggctgtagggtgtcattgatcttgtaatacaacacatatttgatgggtgaatcttattagcactcctttgaaaatgttccagtatggagtcagttgctgataaagaggaagttcacagctaggaatccgaagttaagatttctcaattgccgcctgggcactcatgcctgtagtcccagcacttgggaggccaaggtgggcagatcacctgaggtcgggagttcgggaccagcctggccaacctggtgaagcccccccatctctactaaaaatacaaaaattggccgggtatggtggtggctgcctgtggtcccagctactcgggaggctgaggcgggagaatcacttgagcccgggaggcggaggttgcagtgagccgagattgtgccactgcactccagcctgggtgacagagcaagactccatctcaaaaatagaa

SEQ ID NO: 413 - DNA, 335 bp, Homo sapiens
  CDS 73..252
  sig_peptide 73..135: Von Heijne matrix score 4.30000019073486 seq AGVSCTCAXPASA/KS
  Unsure 121..123: Xaa = Ser or Thr
actccgccttccacgtgcacccactgcctcttcccttctcgcttgggaactctagtctcgcctcgggttgcaatggaccccaactgctcctgtgccgctggtgtctcctgcacctgcgccastcctgcaagtgcaaagagtgcaaatgcacctcctgcaagaagagctgctgctcctggtgcactggccccaccctcgtggacacctgccctgccctgccacctgtctgtctgtcccaaagaagttctggtatgaacttgaggacacatgtccagtgggaggtgagaccacctctcaatattcaataaagctgctgagaatctagcctcgaaaaa

SEQ ID NO: 414 - DNA, 494 bp, Homo sapiens
  CDS 63..422
  sig_peptide 63..167: Von Heijne matrix score 4.09999990463257 seq LSQSLAMSPQTHS/QT
cacggatctcacaggtggaggtggggcgagcttctttctagtgtggaccagaggtgggggcaatgagtaaacatcttcactgtaaggttttgggactgcccctcaggcttgaggtctcggcatcgtgtctcagtcagtccttggcgatgtcccctcagacgcactcacagacttgcatacgtaatttagtaacatgcatcaactatcctagaacatctacagggtgcaaaggaaccaccactcagagaatcatggagccagtggagttagaagtggaagggacagaacaagacaatgctaaaacctgtggttcactaggaagggggaatgaaaacaccatgctccgaggtggattcagcatgaacacaactgtggggcaaggaatttccaagcaaacacaccacactagtaccacttcttcctaaacagaaaagggaaagagcatccttcgacttccccctccctccatcagcaccgggttttcctccaaaaaa

SEQ ID NO: 415 - DNA, 366 bp, Homo sapiens
  CDS 112..306
  sig_peptide 112..153: Von Heijne matrix score 3.70000004768372 seq LCWLKLVSITTVA/II
cctttctcgttccccggccatcttatcggctgctgttggttgggggccgtcccgctcctaaggcaggaagatggtggccgcaaagaagacggaaatctgaaatagagtactatgctatgttggctaaaactggtgtccatcactacagtggcaataatattgaactgggcacagcatgcggaaaatactacagagtgtgcacactggctatcattgatccaggtgactctgacatcattagaagcatgccagaacagactggtgaaaagtaaaccttttcacctacaaaatttcacctgcaaaccttaaacctgcaaaattttcctttaataaaatttgcttgttctaaaaaaaaaaaaaaaaaag

SEQ ID NO: 416 - DNA, 472 bp, Homo sapiens
  CDS 115..411
aagaaaggggtgaggcctaagggacaatcaggatgtttttcagagagaagtgtggatgctggacaggaagaaccacagataccagatacgggtactgttgtaactctgttctccatgaaaaaaaaggaagaaacaacactttcagagatggagcctgttgagccacagtaccaactagtcaatgctgaatcgacttctccctttctacattgcctgagagaagtcattggggaatactctgtacacgaattttcactgttggggaaaacagagagtcaagggattggattgtggattgcattggtggttttcctcagtttcctcatcttctccacaagtttctacatatcgaatgcagagcagcccttcttcaaagaacctcctacggaagctgctaaggaactcagtctgtagctctgcgtggagccatgtgtaaacactgaactgagacctgccacctcctactacctaa

SEQ ID NO: 417 - DNA, 532 bp, Homo sapiens
  CDS 125..508
  Unsure 332..334: Xaa = Pro or Thr
agctrcctgggtaaggcccaagatggctgtcttcgccttagtactcgtgtgaagttggcggggacggttcctgtcatcttcttgggcttatttggtgtgctgttgaaggggggagactagagaaatggcagggaacctcttatccggggcaggtaggcgcctgtgggactgggtgcctctggcgtgcagaagcttctctcttggtgtgcctagattgatcggtataaggctcactctcccgccccccaaagtggttgatcgttggaacgagaaaagggccatgttcggagtgtatgacaacatcgggatcctgggaaactttgaaaagcacmccaaagaactgatcagggggcccatatggcttcgaggttggaaagggaatgaattgcaacgttgtatccgaaagaggaaaatggttggaagtagaatgttcgctgatgacctgcacaaccttaataaacgcatccgctatctctacaaacactttaaccgacatgggaagtttcgatagaagagaaagctgagaacttcg

SEQ ID NO: 418 - DNA, 470 bp, Homo sapiens
  CDS 50..205
actctttccttggctgctcaggtcataggtgctgtgatctagagacaaaatgttccttacactggcagatacttgcaaactaaggggaatgagcttccttctgaatgtttatgaaggagaggccactgtgtcatctgtcttagagctattggaatcctggatcattgtgggaaatgaaagatacttcgatggaatcagcagccattgatccaatgccaactccaagactggaacgtcgcaatgatagttccaaggcggaaatttgacgtaattcttttcgacacagttttacaggtctggatgcccattttaattcttctgaaagcatgcctyctccttctggcttcaggactccatctscagcctcttgatctaaaaataatccccaaaccaaaaaaaaattagatactatttcctcaaaattaggtattttaatcaaaaacatcttaacataaatacattattatcac

SEQ ID NO: 419 - DNA, 559 bp, Homo sapiens
  CDS 175..426
actcggcgggcgctgttgagggagtcgggccgcgactgtggtcgtttttataccttcccgcgcggacgccggcgctgccaacggaagggcgggtagggcgagacggagtttcgtcatgttggccaggcccatttgagatctttgaagatatcctcaacgtgaggctctgctgccatgaaggtgaagattaagtgctggaacggcgtggccacttggctctgggtggccaacgatgagaactgtggcatctgcaggatggcatttaacggatgctgccctgactgcaaggtgcccggcgacgactgcccgctggtgtggggccagtgctcccactgcttccacatgcattgcatcctcaagtggctgcacgcacagcaggtgcagcagcactgccccatgtgccgccaggaatggaagttcaaggagtgaggcccgacctggctctcgctggaggggcatcctgagactccttcctcatgctggcgccgatggctgctggggacagcgcccctgagctgcaacaaggtggawacaagggctggagctgcgtttgttttgc

SEQ ID NO: 420 - DNA, 462 bp, Homo sapiens
  CDS 29..268
atccagcagccccctgctccggcccagcatggcgaccccgacccagacccccacaaaggctcctgaggaacctgacccattttactatgactacaacacggtgcagactgtgggcatgactctggcaaccatcttgttcctgctgggtatcctcatcgtcatcagcaagaaggtgaagtgcaggaaggcggactccaggtctgagagcccaacctgcaaatcctgtaagtctgagcttccctcttcagcccctggtggcggcggcgtgtaacaccttcccgaggaaactccgctgccgaccctgcctgagcgcgggagcctgaggaccgggtggaggcggtggggacccagccgcgcgccgggagcgctccccggaatgagcgccccacccaccccaaggctggagccgctgcaccctgctgtccctctccaggccttggcaatgacgatcccccaaagagc

SEQ ID NO: 421 - DNA, 547 bp, Homo sapiens
  CDS 99..479
tttcgaagggaagggagccccctataaaacagcctacagtggacagtctggtcggcagagccgcaggtcagtcgtgaagagggagctctattgccaccatgagtttctccggcaagtaccaactgcagagccaggaaaactttgaagccttcatgaaggcaatcggtctgccggaagagctcatccagaaggggaaggatatcaagggggtgtcggaaatcgtgcagaatgggaagcacttcaagttcaccatcaccgctgggtccaaagtgatccaaaacgaattcacggtgggggaggaatgtgagctggagacaatgacaggggagaaagtcaagacagtggttcagttggaaggtgacaataaactggtgacaactttcaaaaacatcaagtctgtgaccgaactcaacggcgacataatcaccaataccatgacattgggtgacattgtcttcaagagaatcagcaagagaatttaaacaagtctgcatttcatattattttagtgtgtaaaattaatgtaataaagtgaactttgttttaa

SEQ ID NO: 422 - DNA, 669 bp, Homo sapiens
  CDS 29..259
gacgcakagccgtggggaagttttcgcaatggccgccggaacgtcgccggccgatgctctctgcgacggaaagaaagccgccggacccacttccggtgcgttttacaatgaactccgggcactcgagtcgctccccggaaactatagttctgcttccaccgttgtcctactttggatagcatcaagacaaaaatctcagtcttcgaggaactcacagtgtagcagaaaagacaaaggaggtaaacaggaggagcatgaataattcatcttgatgtaatcatgcaagactcctaagaagatgttaggagaccctgtcatcattcttttggcctctaatgtccgttatcttcatgtttgctggcttccttttactactatggaaatacaacatatgcaaaagtagtgttttcgctgtttaaaaacatcgtcagcagcatcatcatcattaactgcaccaggaagccatgactcctttctggacaaggtgcacttgcctgtcatccttccatctctttcttcctccttgaagttcacaatacccagtccaggagcattgcagagaatgctaggtgtgtctgcagacttgactttaaaagaaaacaagttccttcaagtgagttcatcatgatggggatgatatttgtttgagagaatgtgtgtctttggcaa

SEQ ID NO: 423 - DNA, 546 bp, Homo sapiens
  CDS 78..302
  Unsure 270..272: Xaa = Asp or Gly
ctygccagctgccggtctttcgggggctccgtaactttctatccgtccgcgtcascyttgccaccctcatctccaatatgcctggtccgacccccagtggcactaacgtgggatcctcagggcgctctcccagcaaagcagtggccgcccgggcgcgggatccactgtccggcagaggaaaaatgccagctgtgggacaaggagtgcaggccgcacaacctcggcaggcaccggggggatgtggcgattctacacagaagattcacctggrctcaaagttggccctgttccagtattggttatgagtcttctgttcatcgcttctgtatttatgttgcacatttggggcaagtacactcgttcgtagattcagttacatccatctgtcatctgaagaakgaggaaawaacccaacatttcttggacccaaaagtatagtgactatctgttcatgagagaaattttctgtaagcttgctgtttttaamcaggggatttatcaattaattgatttgaggaatcagtttttttctatggctaataaact

SEQ ID NO: 424 - DNA, 499 bp, Homo sapiens
  CDS 16..183
tttattttgccttctatgtcatcttggagcttaatgtgcatgcaagatatgggaaatactaaagcaagactactctatgaagccaatcttccagagaactttcgaagaccacagacagatcaagcagtggaatttttcatcagagataaatatgaaaagaagaaatactacgaaaaaatgccatagctattacaaatatttcctcctctgatgctcctcttcagcctttggtatcctctccttctctgcaagctgctgttgacaaaaataaattggagaaagaaaaggaaaaaaaaaaggaagagaaaaagagagaaaaggagccagaaaagccggcaaaaccacttacagctgaaaagctgcagaagaaagatcagcaactggagcctaaaaaaagtaccagccctaaaaaagctgcggasccactgtggatcttttaggacttgtttggagaaagattgagaaggaaaagagtgaaaggcagttagttgaagtggaa

SEQ ID NO: 425 - DNA, 512 bp, Homo sapiens
  CDS 122..487
aaacacatccaagcttaagacggtgaggtcagcttcacattctcaggaactctccttctttgggtctggctgaagttgaggatctcttactctctaggccacggaattaacccgagcaggcatggaggcctctgctctcacctcatcagcagtgaccagtgtggccaaagtggtcagggtggcctctggctctgccgtagttttgcccctggccaggattgctacagttgtgattggaggagttgtggccatggcggctgtgcccatggtgctcagtgccatgggcttcactgcggcgggaatcgcctcgtcctccatagcagccaagatgatgtccgcggcggccattgccaatgggggtggagttgcctcgggcagccttgtggctactctgcagtcactgggagcaactggactctccggattgaccaagttcatcctgggctccattgggtctgccattgcggctgtcattgcgaggttctactagctccctgccctcgcctgcagag

SEQ ID NO: 426 - DNA, 502 bp, Homo sapiens
  CDS 57..278
attcaccggcgacgcgatacggttcctccaccgaggcccatgcgaagctttccactatggcttccagcactgtcccggtgagcgctgctggctcggctaatgaaactcccgaaataccggacaacgtgggagattggcttcggggcgtctaccgctttgccactgataggaatgacttccggaggaacttgatactaaatttgggactctttgctgcgggagtttggctggccaggaacttgagtgacattgacctcatggcacctcagccaggggtgtagccaagtagttctaatgccacctgtcgtcttatcatctgattgcagacaaatggaatcctgtgctgaacccgaatcttccaaaaaacagcctacaatctgtgaccaccacaagatgtgccctgatggcagctgaagtttgattcagatgggcacttttcttccccttccctgcctagtttccttttgttccttgagtcacgcagaattccattctctggtca

SEQ ID NO: 427 - DNA, 575 bp, Homo sapiens
  CDS 50..340
gaggagaagaggtgaccccgctaaagataataaatcatcattgatcaagatgtcttcagcacctgagcctccaacattcaaaaaggaaccacccaaagaraaagagtttcaaagcccagggctcagaggggtgcgcacaacaaccttatttcgtgctgtgaatccagagctcttcattaaacctaacaaacctgtaatggctttcggattggtaactctttcactttgcgtggcatatattggttatctacatgcaatacaagagaataaaaaggacctctatgaagctattgatagtgaggggcacagttatatgaggcggaaaacatccaaatgggattagtagtgctggttagtgcaratggacctttattaaaggttctgaaatcttcaaatgaaagaccttgtgagtgtacagtatcatgtttcttgttctagaacatgctaatgaagagagaagatagcagttgcaaccagacaactgtcgtaaattttgtcctttcacagctgcagccattatctcattctttttccacagagtgagcgtcataatattttctttccttactcttata

SEQ ID NO: 428 - DNA, 493 bp, Homo sapiens
  CDS 177..470
atcgaccacggaaatttgacacctccgggcttggaagcagctctctcctccttccccgctgcttataaacctcagccctgaggctccagctcactctaccccatctccttgccgggtcagccctgacaaaggtcagctagccccttgaggacatcagctttggcctcagggtcctaatggcagcagaaccactgacagagctagaggagtccattgagaacgtggtcaccaccttcttcacctttgcaaggcaggagggccggaaggatagcctcagcgtcaacgagttcaaagagctggttacccagcagttgccccatctgctcaaggatgtgggctctcttgatgagaagatgaagagcttggatgtgaatcaggactcggagctcaagttcaatgagtactggagattgattggggagctggccaaggaaatcaggaagaagaaagacctkaagatcaggaagaagtaaagccgcctggctgagatggg

SEQ ID NO: 429 - DNA, 505 bp, Homo sapiens
  CDS 114..458
agttccggctctgcstgaagagctttgcattgtgggaagtytttytttctcgttccccggccatcttagcggctgctgttggttgggggccgtcccgctcctaaggcaggaagatggtggccgcaaagaagacgaaaaagtcgctggagtcgatcaactctaggctccaactcgttatgaaaagtgggaagtacgtcctggggtacaagcagactctgaagatgatcagacaaggcaaagcgaaattggtcattctcgctaacaactgcccagctttgaggaaatctgaaatagagtactatgctatgttggctaaaactggtgtccatcactacagtggcaataatattgaactgggcacagcatgcggaaaatactacagagtgtgcacactggctatcattgatccaggtgactctgacatcattagaagcatgccagaacagactggtgaaaagtaaaccttttcacctacaaaatttcacctgcaaaaaaaaaaaaaaav

SEQ ID NO: 430 - DNA, 772 bp, Homo sapiens
  CDS 324..629
  Unsure 576..578: Xaa = Asn or Asp
ataatcgcgtcatttccgggaggggacgaaggggtagttctttcacctcggctgggcgcctagaaaagcctagaaacagctccttttttcttccgcctccgagtcttcgcgtcagcgtcctgcgcagggcccttggggcgaatcgcggtgcgcgtcggggcgaccgccctccctccctgggaggggcgagggggctagcggcgacsgctggggcgagcgcgcctgcgcgctgggtgattttttcacgtgtcgccagggccggactgcgagtctctttgcggcgctacactagagcagagtacgagtctgaggcggagggagtaatggcaggacaagcgtttagaaagtttcttccactctttgaccgagtattggttgaaaggagtgctgctgaaactgtaaccaaaggaggcattatgcttccagaaaaatctcaaggaaaagtattgcaagcaacagtagtcgctgttggatcgggttctaaaggaaagggtggagagattcaaccagttagcgtgaaagttggagataaagttcttctcccagaatatggaggcaccaaagtagttctagatracaaggattatttcctatttagagatggtgacattcttggaaagtacgtagactgaaataagtcactattgaaatggcatcaacatgatgctgcccattccactgaagttctgaaatctttcgtcatgtaaataatttccatatttctcttttataataaactaatgataactaatgaccaaaaaaaaaaaaaaaa

SEQ ID NO: 431 - DNA, 672 bp, Homo sapiens
  CDS 224..529
cataagaacagggaggttagaagtagggtcttggtgacaaaatatgttgtgtagagttcaggggagagtgcgtcatatgttgttctaggaagattgtagtggtgagggtgtttattataataatgtttgtgtattcggctatgaagaataggccagggccggactgcgagtctctttgcggcgctacactagagcagagtacgagtctgaggcggagggagtaatggcaggacaagcgtttagaaagtttcttccactctttgaccgagtattggttgaaaggagtgctgctgaaactgtaaccaaaggaggcattatgcttccagaaaaatctcaaggaaaagtattgcaagcaacagtagtcgctgttggatcgggttctaaaggaaagggtggagagattcaaccagttagcgtgaaagttggagataaagttcttctcccagaatatggaggcaccaaagtagttctagatgacaaggattatttcctatttagagatggtgacattcttggraagtacgtagactgaaataagtcactattgaaatggcatcaacatgatgctgcccattccactgaagttctgaaatctttcgtcatgtaaataatttccatatttctcttttataataaactaatgataactaatgaccaaaaaaaaaaaaaaaa

SEQ ID NO: 432 - DNA, 517 bp, Homo sapiens
  CDS 97..444
atctttccgtcccgggcagccagcgccagtcggagccagcgcgagccgccgccgccatcactgccgctgccaagtcctccacccgctgcccccgccatgtctgctaccgctgccacggccccccctgctgccccggctggggagggtggtccccctgcaccccctccaaacctcaccagtaacaggagactgcagcagacccaggcccaggtggatgaggtggtggacatcatgagggtgaacgtggacaaggtcctggagcgagaccagaagctgtcggagctggacgaccgtgcagatgcactccaggcgggggcctcccagtttgaaacaagcgcagccaagctcaagcgcaaatactggtggaaaaacctcaagatgatgatcatcttgggagtgatttgcgccatcatcctcatcatcatcatagtttacttcagcacttaaatccccgaggagtctgccctgcctagagaagggcctctcccccaaccctcagccgttcctccacctctct

SEQ ID NO: 433 - DNA, 485 bp, Homo sapiens
  CDS 21..311
  Unsure 180..182: Xaa = Glu or Lys
tttgttttctaatagggcaaatgtctctaagcttggtgtttagagctgcttcatattttaaactagttccattccacagttctagttcaaaccagtttttacagcctcctgggtgggtcgtcttgacccaaactcttgtgttgttacattttgagaggttttcataccagaatgtaccaraaagtgcacaaggtaaaggtaatttacagccagaaacaaatatacatttgtttcatttcttgactttccctaagcagataagcagaaacttgtttaactcattactttgtttgatgtgtcttacatatttttgactaaaagttatagaatgttattcctctgggggaatcttttacaggtggaggaatggggatagcagtattgcctcagattcaaactggcatcaccataaaccctgtaggccagggtggaatgaagtcagctcctttttatagttgaaatacaattttttattcaccattgtc

SEQ ID NO: 434 - DNA, 511 bp, Homo sapiens
  CDS 31..369
  Unsure 358..360: Xaa = Ser or Thr
acttgctctgcccgctcaaacagttgcaggatgtcgatgacagacttgctgaacgctgaggacatcaagaaggcggtgggagcctttagcgctaccgactccttcgaccacaaaaagttcttccaaatggtcggcctgaagaaaaagagtgcggatgatgtgaagaaggtgtttcacatgctggacaaggacaaaagtggcttcatcgaggaggatgagctgggattcatcctaaaaggcttctccccagatgccagagacctgtctgctaaagaaaccaagatgctgatggctgctggagacaaagatggggacggcaaaattggggttgacgaattctccactctggtggctgaaastaagaagcactgactgcccctggtcttccacctctctgccctgaacacccaatctcggcccctctcgccaccctcctgcatttctgttcagttcgtttatgttattttttactcccccatcccctgtggccctctaatgacaccattcttct

SEQ ID NO: 435 - DNA, 511 bp, Homo sapiens
  CDS 82..417
cccttctgcgcggtcacgcgagccagcgcctgggcctggaaccgggccgtagcccccagtttcgcccaccacctccctaccatggacccccgcaaagtgaacgagcttcgggcctttgtgaaaatgtgtaagcaggatccgagcgttctgcacaccgaggaaatgcgcttcctgagggagtgggtggagagcatgggtggtaaagtaccacctgctactcaaaaagctaaatcagaagaaaataccaaggaagaaaaacctgatagtaagaaggtggaggaagacttaaaggcagacgaaccatcaagtgaggaaagtgatctagaaattgataaagaaggtgtgattgaaccagacactgatgctcctcaagaaatgggagatgaaaatgcggagataacggctcaacattttttgtagccacaggcttccacggacttcacgtcattattggctcaactttcctcactatctgcttcatccgccaactaatatttcactttacatccca

SEQ ID NO: 436 - DNA, 475 bp, Homo sapiens
  CDS 22..375
agtcgagccagcgtcgccgcgatggtgttgttggagagcgagcagttcctgacggagctgaccagacttttccagaagtgccggacgtcgggcagcgtctatatcaccttgaagaagtatgacggtcgaaccaaacccattccaaagaaaggtactgtggagggctttgagcccgcagacaacaagtgtctgttaagagctaccgatgggaagaagaagatcagcactgtggtgagctccaaggaagtgaataagtttcagatggcttattcaaacctccttagagctaacatggatgggttgaagaagagagacaaaaagaacgaaactaagaagaccaaagcagcagcagcagcagcagcaacagcagcacagtaaagggcatacatttcctgctttcaccaattaaccactgaattgctattttttccttttggccagatagctaggtttctggttcccccacagtaggtgt

SEQ ID NO: 437 - DNA, 896 bp, Homo sapiens
  CDS 351..677
  Unsure 234: n = a, g, c or t
  Unsure 378..380: Xaa = Arg or His
  Unsure 462..464: Xaa = Ile or Phe
  Unsure 468..470: Xaa = Arg or Gln
  Unsure 639..641: Xaa = Leu or Phe
gcacgagaccattacataaaaacaaacaggaatgcattcttgacatttccgaacacacattaagtgaaaatgacttagaagaactaagggtagatcactataaatgtaacatacaggcatctgtacatgtttctgatttcagtacagataatagtggatctcaaccaaaacagaagtcagatactgtgctttttccagcaaaggatctcaaggaaaaggaccttcattcaatanttactcatgattctggtctgataacaataaacagttcacaagagcacctaactgttcaggcaaaggctccattccatactcctcctgaggaacccaatgaatgtgacttcaagaatatggatagtttaccttctggtaaaatacrtcgaaaagtgaaaataatattaggacgaaatagaaaagaaaatctggaaccaaatgctgaatttgataaaagaactgaatttwttacacragaagaaaacagaatttgtagttcaccggtacagtctttactagacttgtttcagactagtgaagagaaatcagaatttttgggtttcacaagctacacagaaaagagtggtatatgcaatgttttagatatttgggaagaggaaaattcagataatctgttaacagcgttwttctcgtccccttcaacttctacatttactggcttttagaatttaaaaaatgcatacttttcagaagtgataaggatcatattcttgaaatttttataaatatgtatggaaattcttaggatttttttaccagctttgtttacagacccaaatgtaaatattaaaaataaatatttgcaattttctacagaattgaatacctgttaaagaaaaattacagaataaacttgtgactggtaaaaaaaaaaaaaaatg

SEQ ID NO: 438 - DNA, 576 bp, Homo sapiens
  CDS 162..470
cattttaattcatatytgagtgggcggtggcgattggtgttggcggtctggctcagctgggcagggggtaactttactgatttgggggtggtttttagtttaatttttcttttctagcttcccatcgacggtcagtgcgcacgttgtaatcagctgaggccatgtcaggagacggagccacggagcaggcagctgagtatgtcccagagaaggtgaagaaagcggaaaagaaattagaagagaatccatatgaccttgatgcttggagcattctcattcgagaggcacagaatcaacctatagacaaagcacggaagacttatgaacgccttgttgcccagttccccagttctggcagattctggaaactgtacattgaagcagaggttactattttattttattttttcttatatcagtattgcagcattcactgtagtgatagaaaacaagttaggaacatagccaattaggacaaggaggatttaaatgtgtcttacctttattttgtaaaataggtataaaggagtaattaaaatgaatttttgaaatttgggtcttttacaagctgatgat

SEQ ID NO: 439 - DNA, 484 bp, Homo sapiens
  CDS 32..349
actaactagcaaacggggactagaaatagggatgctgaaaagcaacggggagagacgcagtcgtaacgcacttccggcggtctacgcgaggaagatggctgcatcccagcagcaagcttcagcggcttcctcagctgctggtgtatcgggtcctagttcggctggcggcccgggtccccagcagcagccgcaaccgccagcacaactggtgggccctgcccagagcggcctcctgcagcaacagcaacaggacttcgatcctgtgcagcgttataagatgctcatcccgcagctgaaggagagtctacaggtgattggccttaagcagcgagaagcaaactggatttggtagtctagaggggcaggccgrgggccaggttagtcggagagagcgctaagcagaaagaggaatagaacctgctgttttggcctggctggtgcacgcctgtgttccagcactttgggaggccgaggcgkgcggatc

SEQ ID NO: 440 - DNA, 523 bp, Homo sapiens
  CDS 114..371
ctctctcagcttccggctggtagtagttccgcttcctgtccgactgtggtgtctttgctgagggtcacattgagctgcaggttgaatccggggtgcctttaggattcagcaccatggcggaagacatggagaccaaaatcaagaactacaagaccgccccttttgacagccgcttccccaaccagaaccagactagaaactgctggcagaactacctggacttccaccgctgtcagaaggcaatgaccgctaaaggaggcgatatctctgtgtgcgaatggtaccagcgtgtgtaccagtccctctgccccacatcctgggtcacagactgggatgagcaacgggctgaaggcacgtttcccgggaagatctgaactggctgcatctccctttcctctgtcctccatccttctcccaggatggtgaagggggacctggtacccagtgatccccaccccaggatcctaaatcatgacttacctgctaataaaaactcattggaaaagyraaaaaaaaaaaaaaa

SEQ ID NO: 441 - DNA, 499 bp, Homo sapiens
  CDS 95..409
ttcgaagtggttgtstctgcactatttactgaaaagttcatcctttccccagtgatttgtaacactgcctctttcataaattaaatttttgtgtatgtgtgtgggtcttttgatggtttctattctgactgacatcaatttgtctaatcttgtagcagtacagtacagtcctgattattgcaactttaggaaaaggtctgataaaaaccaagatgcctccacattttgtcataattgtaaccaatttcacctctgtctccagtatcaccacaaaattgttcttccttggagtgtcttggctattcttagccaactgttcctccatattacttctagaattagaccaacaatttataaatcaaacaaacccaagagcattgaaattttgattggatttgtattgaatttatagattaatctggtaaaccatgtcatctttacaatgttgtcttccaatacatgaatatggtacagctcttcatttacttaggcctttgaa

SEQ ID NO: 442 - DNA, 460 bp, Homo sapiens
  CDS 75..377
  Unsure 330..332: Xaa = Leu or Val
  Unsure 357..359: Xaa = Cys or Trp
ccctcgcggagcttactgagcgcggccccgagcccagctccgccgccgagcgcctgtgccggcacggmwacaccatggagcgcccggataaggcggcgctgaacgcactgcagcctcctgagttcagaaatgaaagctcattagcatctacactgaagacgctcctgttcttcacagctttaatgatcactgttcctattgggttatatttcacaactaaatcttacatatttgaaggcgcccttgggatgtccaatagggacagctatttttacgctgctattgttgcagtggtcgccgtccatgtggtgctggccctctttgtgtatktggcctggaatgaaggctcacgacagtgkcgtgaaggcaaacaggattaaagtgaacatcacctttttatagcattaaattcattttttaaaatgataaatgctggagggggccatctgatttgaataaa

SEQ ID NO: 443 - DNA, 470 bp, Homo sapiens
  CDS 30..305
agaatgtcgtactctcaggaggctccaccatgttcagggatttcggacgccgactgcagagggatttgaagagagtggtggatgctaggctgaggctcagcgaggagctcagcggcgggaggatcaagccgaagcctgtggaggtccaggtggtcacgcatcacatgcagcgctacgccgtgtggttcggaggctccatgctggcctcgactcccgagttctttcaggtctgccacaccaagaaggactatgaagagtacgggcccagcatctgccgccacaaccccgtctttggagtcatgtcctagtgtctgcctgaacgcgtcgttcgatggtgtcacgttggggaacaagtgtccttcagaacccagagaaggccgccgttctgtaaatagcgacgtcggtgttgctgcccagcagcgtgcttgcattgccggtgcatgaggcgcggcgcgggccttcagtaaaag

SEQ ID NO: 444 - DNA, 521 bp, Homo sapiens
  CDS 162..455
  Unsure 312..314: Xaa = Asp or Tyr
  Unsure 417..419: Xaa = Glu or *
agaatacgtacaccaatgcggacaagctcctagaagcagcagagcagttggctcagacgggggaatgtgaccccgaggagatctacaaggcagctcgacacctggaggtgcgcatccaagacttcgtgcgcagggtggagcagcggaagcttctcctggacatgtctgtttccttccacacacacaccaaagagttgtggacatggatggaagaccttcagaaggagatgttggaggatgtctgtgcagattctgtggatgcagtccaggaactgatcaagcagttccagcagcagcagaccgccactctakatgccacactcaatgtcatcaaggaaggcgaagaccttatccagcagctcaggtcagcgcctccctccctcggggagcccagcgaggccaggtcagcatgggcakagctttccagtgggaaatgcctcgggctagacgtgagataagtcctgtcccagtcttgactcagcaaaatcttgctttgtggtcttgtgtgagccttcggtttc

SEQ ID NO: 445 - DNA, 625 bp, Homo sapiens
  CDS 281..547
atgctcgccagaatacccctcgttaaaggcaaggcggcttctggctcttccgcagctcagttatgggttcctgtgtgcttagtcatcgggtccgacacaggctggactgatctggggagccgcgaagggcctgccttcacaaagggacgtaacgcaagtactgcgggcagtgtttgaatatggccctgaacaatgtgtccctgtcctccggtgatcagaggagcagggtggcctaccgctcttcccatggcgacctcagaccgcgggcgtcasgttggcgatggtctccggagacggcttcctcgtttccaggcctgaagcgattcatctaggacctcggcaggcggtgcgaccaagcgttcgggccgagagccgtcgagtggatggtggcggccggagcccaagggaaccagatggccggggccggagccgccaagcsagattctcaccttacccaatccctgccgttgaacccgatctcctaagaagtgtgctgcaacagcgtttgattgcattaggaggtgttatcgcagctcgaatttcagtttaaacgaacacctttcctctggccctcacttagcttgtgaacaggcctttttaaaatcctttcttggtgtagcagcaa

SEQ ID NO: 446 - DNA, 534 bp, Homo sapiens
  CDS 8..523
agtcaagatggcgggagcagctacccaggcttccctggagtcggccccacggatcatgcggctggtggccgaatgcagccgctccagggcccgggcaggcgagctgtggctgccgcatgggacagtggccactcctgtgttcatgccagtgggcacgcaggccaccatgaagggcatcacgaccgaacagctggacgctctgggttgccgcatctgcctgggcaatacctaccatctgggtctaaggccgggacccgagctgatccagaaagccaacggtctccacggcttcatgaattggcctcataatctgctaacggacagcggcggtttccagatggtgtcgctggtgtctctgtccgaggtgacggaggagggcgtccgcttccgctccccctacgacggcaatgagaccctgctgagcccggagaaatccgtgcagatccagaatgcgctgggctcggacatcatcatgcagctggacgacgtggttagcagtactgtgactgggccacgtgtggagtaggccatgta

SEQ ID NO: 447 - DNA, 111 bp, Homo sapiens
agagctgagctgaagcgggacccggagcccgagcagccgccgccatggcaatcaaatttctggaagtcatcaagcccttctgtgtcatcctgcaactaacatctgtgaagc

SEQ ID NO: 448 - DNA, 150 bp, Homo sapiens
ttttctcaacaattcctcaccgcagagcctctgaagctcccaccaggccagctctcctccacccaccgctaactctcagccccagtcaccctcttggagcttccctgctttgaattaaagaccactcatgcgcaaaaaaaaaaaaaaaaa

SEQ ID NO: 449 - DNA, 465 bp, Homo sapiens
aaccaaagcatgggctctttgtttcctctttgccaggcctgggtccttcccagtgacccctcagccttcacttcctcctcactcccggggagctgtgacaggaagaggagatcccagaactggagattgacgtggatgagctcctggacatggagagtgacgatgcccgggctgccagggtcaaggagctgctggttgactgttacaaacccacagaggccttcatttctggcctgctggacaagatccggggcatgcagaagctgagcacaccccagaagaagtgagggtccccgacccaggagaacggtggctcccacaggacaawtcgctgccccccaacctcgtagcaacakgcaataccgggggaccctgcggccaggctggtgccatgagcagggctcctcgtgcccctggcccaggggtctcttcccctgccccctcagttttccacttttggggtyt

SEQ ID NO: 450 - DNA, 394 bp, Homo sapiens
agtctgaagatggcggcctcagcagcgcgaggtgctgcggcgctgcgtagaagtatcaatcagccggttgcttttgtgagaagaattccttggactgcggcgtcgagtcagctgaaagaacactttgcacagttcggccatgtcagaaggtgcattttaccttttgacaaggagactggctttcacagaggtttgggttgggttcagttttcttcagaagaaggacttcggaatgcactacaacaggaaaatcatattatagatggagtaaaggtccaggttcacactagaaggccaaaacttccgcaaacatctgatgatgaaaagaaagatttttgagactgcagcctattaataaagttaacataactgacaaaaaaaaaaaaaaaaarsc

SEQ ID NO: 451 - DNA, 391 bp, Homo sapiens
aagtctgaagatggcggcctcagcagcgcgaggtgctgcggcgctgcgtagaagtatcaatcagccggttgcttttgtgagaagaattccttggactccggcgtcgagtcagctgaaagaacactttgcacagttcggccatgtcagaaggtgcattttaccttttgacaaggagactggctttcacagaggtttgggttgggttcagttttcttcagaagaaggacttcggaatgcactacaacaggaaaatcatattatagatggagtaaaggtccaggttcacactagaaggccaaaacttccgcaaacatctgatgatgaaaagaaagatttttgagactgcagcctattaataaagttaacataaccaaaaaaaaaaaaaaaaags

SEQ ID NO: 452 - DNA, 427 bp, Homo sapiens
cccartcagagggctgaacatgtccgagtttgtctgtaacctgtcagcaaggccttatgtgtacgacctcattgccgtgtccaatcattatggagccatgggggttggccactactaaagcagcttatgtgctattttaccaacgtcgagatgatgaattttataagacaccttcacttagcagttctggttcctctgatggagggacacgaccaagcagctctcagcagggctttggggatgatgaggcttgcagcatggacaccaactaatgctgactccacgatcctgccaccctgtagcgccagtgtaatcccccaggagaacatctttgacactctgcagactgctagtgttctgtctaaaaaccagacaaggaaatacccttcttttatgagcagaaggaaacaaaaaaaaaaaaaaaagg

SEQ ID NO: 453 - DNA, 438 bp, Homo sapiens; identical to SEQ ID NO: 162

SEQ ID NO: 454 - DNA, 394 bp, Homo sapiens
agtctgaagatggcggcctcagcagcgcgaggtgctgcggcgctgcgtagaagtatcaatcagccggttgcttttgtgagaagaattccttggactgcggcgtcgagtcagctgaaagaacactttgcacagttcggccatgtcagaaggtgcattttaccttttgacaaggagactggctttcacagaggtttgggttgggttcagttttcttcagaagaaggacttcggaatgcactacaacaggaaaatcatattatagatggagtaaaggtccaggttcacactagaaggccaaaacttccgcaaacatctgatgatgaaaagaaagatttttgagactgcagcctattaataaagttaacataactgamaaaaaaaaaaaaaaaaaggc

SEQ ID NO: 455 - DNA, 713 bp, Homo sapiens
atataggcgtggctgaatacgggcctcctgcgtacgtgcgtggtgtacgtacgtgcgtgattacgcgcamacgtacgttcctcatgaaagggacgacgggagctgcatgaaagccgaagttatggaccgctagcatctgtcactggccaccggtttccgggagtaagcggcagctaccttacagccctgacacgagccgggtgctctctcttctcaccgcggcccacgtctcctcgctggctccggtggcctcgctgggtcgcgaggaggcggaggactgtactctgaggccaaaagccagagtcggccctgaacgcccacgactctcagggtccagaggccgtgagaccggccggctgaaaggtaaagaaaccaagtggaagagtgtttcctcctctggccgtaaagcaggtactctctgcagcaccagctgtccccgccctactccggaccgccmcaaagactccatgggatggacctgagtcagccgaatcctagccccttcccttgggcctgctgtggtgctcgacatcagtgacagacggaagcagcagaccatcaaggctacgggaggcccggggcgcttgcgaagatgaagtttggctgcctctccttccggcagccttatgctggctttgtcttaaatggaatcaagactgtggagacgcgctggcgtcctctgctgagcagccagcggaactgtaccatcgccg

SEQ ID NO: 456 - protein, 128 aa, Homo sapiens
  SIGNAL -34..-1
MSLRLDTTPSCNSARPLHALQVLLLLSLLLTALASSTKGQTKRNLAKGKEESLDSDLYAELRCMCIKTTSGIHPKNIQSLEVIGKGTHCNQVEVIATLKDGRKICLDPDAPRIKKIVQKKLAGDESAD

SEQ ID NO: 457 - protein, 65 aa, Homo sapiens
  SIGNAL -18..-1
MKAAVLTLAVLFLTGSQARHFWQQDEPPQSPWDRVKDLATVYVDVLKDSGRDYVSQFEGSAWENS

SEQ ID NO: 458 - protein, 80 aa, Homo sapiens
  SIGNAL -26..-1
  UNSURE 31: Xaa = Ala or Val
MGRAMVARLGLGLLLLALLLPTQIYSSETTTGTSSNSSQSTSNSGLAPNPTNATTKXAGGALQSTASLFVVSLSLLHLYS

SEQ ID NO: 459 - protein, 101 aa, Homo sapiens; identical to SEQ ID NO: 173
  SIGNAL -27..-1

SEQ ID NO: 460 - protein, 86 aa, Homo sapiens; identical to SEQ ID NO: 175
  SIGNAL -18..-1

SEQ ID NO: 461 - protein, 92 aa, Homo sapiens
  SIGNAL -24..-1
MVMGLGVLLLVFVLGLGLTPPTLAQDNSRYTHFLTQHYDAKPQGRDDRYCESIMRRRGLTSPCKDINTFIHGNKRRSRPSVKTRMETLTEKT

SEQ ID NO: 462 - protein, 111 aa, Homo sapiens
  SIGNAL -16..-1
  UNSURE 50: Xaa = Asn or Asp
MLLILLSVALLAFSSAQDLDEDVSQEDVPLVISDGGDSEQFIDEERQGPPLGGQQSQPSAGDGNQXDGPQQGPPQQGGQQQQGPPPPQGKPQGPPPQGGRPQGPPQGQSPQ

SEQ ID NO: 463 - protein, 106 aa, Homo sapiens; identical to SEQ ID NO: 178
  SIGNAL -16..-1

SEQ ID NO: 464 - protein, 141 aa, Homo sapiens; identical to SEQ ID NO: 179
  SIGNAL -24..-1

SEQ ID NO: 465 - protein, 124 aa, Homo sapiens; identical to SEQ ID NO: 180
  SIGNAL -30..-1

SEQ ID NO: 466 - protein, 124 aa, Homo sapiens; identical to SEQ ID NO: 181
  SIGNAL -30..-1

SEQ ID NO: 467 - protein, 69 aa, Homo sapiens; identical to SEQ ID NO: 182
  SIGNAL -17..-1

SEQ ID NO: 468 - protein, 77 aa, Homo sapiens
  SIGNAL -33..-1
MGPVKQLKRMFEPTRLIATIMVLLSFALTLCSAFWWHNMGLALIFCILQSLALTWYSLSFIPFARDAVKKCFAVCLA

SEQ ID NO: 469 - protein, 146 aa, Homo sapiens; identical to SEQ ID NO: 184
  SIGNAL -26..-1

SEQ ID NO: 470 - protein, 62 aa, Homo sapiens; identical to SEQ ID NO: 185
  SIGNAL -46..-1

SEQ ID NO: 471 - protein, 162 aa, Homo sapiens
  SIGNAL -47..-1
MRIANRTRFSSPFLARGAGWTHGRGMMVVGTGTSLALSSLLSLLLFAGMQMYSRQLASTEWLTIQGGLLGSGLFVFSLTAFNNLENLVFGKGFQAKIFPEILLCLLLALFASGLIHRVCVTTCFIFSMVGLYYINKISSTLYQAAAPVLTPAKVTGKSKKRN

SEQ ID NO: 472 - protein, 90 aa, Homo sapiens; identical to SEQ ID NO: 188
  SIGNAL -35..-1

SEQ ID NO: 473 - protein, 61 aa, Homo sapiens
  SIGNAL -25..-1
  UNSURE 27: Xaa = Ala or Val
MRLLQLLFRASPATLLLVLCLQLGANKAQDNTRKIIIKNFDIPKSVRPNDEXLQCLQFKQN

SEQ ID NO: 474 - protein, 120 aa, Homo sapiens; identical to SEQ ID NO: 190
  SIGNAL -32..-1

SEQ ID NO: 475 - protein, 78 aa, Homo sapiens; identical to SEQ ID NO: 191
  SIGNAL -19..-1

SEQ ID NO: 476 - protein, 87 aa, Homo sapiens; identical to SEQ ID NO: 192
  SIGNAL -20..-1

SEQ ID NO: 477 - protein, 105 aa, Homo sapiens; identical to SEQ ID NO: 193
  SIGNAL -19..-1
  UNSURE 37: Xaa = Lys or *

SEQ ID NO: 478 - protein, 102 aa, Homo sapiens
  SIGNAL -36..-1
  UNSURE 31: Xaa = Arg or His
MSNTTVPNAPQANSDSMVGYVLGPFFLITLVGVVVAVVMYVQKKKRVDRLRHHLLPMYSYDPAEELXEAEQELLSDMGDPKVVHGWQSGYQHKRMPLLDVKT

SEQ ID NO: 479 - protein, 137 aa, Homo sapiens; identical to SEQ ID NO: 196
  SIGNAL -18..-1

SEQ ID NO: 480 - protein, 101 aa, Homo sapiens [sequence omitted]

SEQ ID NO: 481 - protein, 128 aa, Homo sapiens
  SIGNAL -26..-1
MCWLRAWGQILLPVFLSLFLIQLLISFSENGFIHSPRNNQKPRDGNEEECAVKKSCQLCTEDKKCVWCSEEKACKKYCFPYFGCRFSSIYWLNCKVDMFGIMMLLLIAVLITGFVWYCCAYHFYLQDI

SEQ ID NO: 482 - protein, 142 aa, Homo sapiens
  SIGNAL -24..-1
  UNSURE 80: Xaa = Arg, Leu, or Trp
  UNSURE 79: Xaa = Asn or Lys
MRLSWFRVLTVLSICLSAVATATGAEGKRKLQIGVKKRVDHCPIKSRKGDVLHMHYTGKLEDGTEFDSSLPQNQPFVFSLGTGQVIKGWDQGLLGMCEGEKRXXVIPSELGYGERGAPPKIPGGATLVFEVELLKIERRTEL

SEQ ID NO: 483 - protein, 70 aa, Homo sapiens [sequence omitted]

SEQ ID NO: 484 - protein, 55 aa, Homo sapiens
  SIGNAL -23..-1
MAGPAAAFRRLGALSGAAALGFASYGAHGANSQMPTGRSCLTRPTNTTSYTAWPC

SEQ ID NO: 485 - protein, 55 aa, Homo sapiens; identical to SEQ ID NO: 484
  SIGNAL -23..-1

SEQ ID NO: 486 - protein, 54 aa, Homo sapiens; identical to SEQ ID NO: 203
  SIGNAL -17..-1

SEQ ID NO: 487 - protein, 83 aa, Homo sapiens; identical to SEQ ID NO: 204
  SIGNAL -15..-1

SEQ ID NO: 488 - protein, 98 aa, Homo sapiens; identical to SEQ ID NO: 205
  SIGNAL -43..-1

SEQ ID NO: 489 - protein, 82 aa, Homo sapiens; identical to SEQ ID NO: 206
  SIGNAL -43..-1

SEQ ID NO: 490 - protein, 99 aa, Homo sapiens
  SIGNAL -28..-1
MTSALTQGLERIPDQLGYLVLSEGAVLASSGDLENDEQAASAISELVSTACGFRLHRGMNVPFKRLSVVFGEHTLLVTVSGQRVFVVKRQNRGREPIDV

SEQ ID NO: 491 - protein, 186 aa, Homo sapiens
  SIGNAL -15..-1
  UNSURE 148: Xaa = Gln or Glu
MHVMAASMARGGVSARVLLQAARGTWWNRPGGTSGSGEGVALGTTRKFQATGSRPAGEEDAGGPERPGDVVNVVFVDRSGQRIPVSGRVGDNVLHLAQRHGVDLEGACEASLACSTCHVYVSEDHLDLLPPPEEREDDMLDMAPLLQENSRLGCQIVLTPELXGAEFTLPKITRNFYVDGHVPKPH

SEQ ID NO: 492 - protein, 123 aa, Homo sapiens
  SIGNAL -48..-1
MEALGKLKQFDAYPKTLEDFRVKTCGGATVTIVSGLLMLLLFLSELQYYLTTEVHPELYVDKSRGDKLKINIDVLFPHMPCAYLSIDAMDVAGEQQLDVEHNLFKQRLDKDGIPVSSEAERHD

SEQ ID NO: 493 - protein, 77 aa, Homo sapiens
  SIGNAL -29..-1
  UNSURE 36: Xaa = Arg or Gln
MAATDFVQEMRAVGERLLLKLQRLPQAEPVEIVAFSVIILFTATVLLLLLIACSCCCTHCCCPEXRGRKVQVQPTPP

SEQ ID NO: 494 - protein, 107 aa, Homo sapiens; identical to SEQ ID NO: 215
  SIGNAL -27..-1

SEQ ID NO: 495 - protein, 112 aa, Homo sapiens
  SIGNAL -39..-1
  UNSURE -37: Xaa = Gln, Glu, Lys, or *
MLXHLSSLPTQMDYKGQKLAEQMFQGIILFSAIVGFIYGYVAEQFGWTVYIVMAGFAFSCLLTLPPWPIYRRHPLKWLPVQAQTTRNQGKEKLRGMLKIIEVFMIQHLLLFL

SEQ ID NO: 496 - protein, 103 aa, Homo sapiens
  SIGNAL -21..-1
MALCALTRALRSLNLAPPTVAAPAPSLFPAAQMMNNGLLQQPSALMLLPCRPVLTSVALNANFVSWKSRTKYTITPVKMRKSGGRDHTGAGNVRSNSRPSIQR

SEQ ID NO: 497 - protein, 92 aa, Homo sapiens [sequence omitted]

SEQ ID NO: 498 - protein, 87 aa, Homo sapiens; identical to SEQ ID NO: 223
  SIGNAL -39..-1

SEQ ID NO: 499 - protein, 125 aa, Homo sapiens
  SIGNAL -15..-1
  UNSURE 100: Xaa = Asn or Thr
MKLLTHNLLSSHVRGVGSRGFPLRLQATEVRICPVEFNPNFVARMIPKVEWSAFLEAADNLRLIQVPKGPVEGYEENEEFLRTMHHLLLEVEVIEGTLQCPESGRMFPISRGIPXMLLSEEETES

SEQ ID NO: 500 - protein, 52 aa, Homo sapiens
  SIGNAL -22..-1
  UNSURE 26: Xaa = Asn or Ile
MKISVAAIPFFLLITIALGTKTESSSRGPYHPSECCFTYTTYKIPRQXYGLL

SEQ ID NO: 501 - protein, 72 aa, Homo sapiens [sequence omitted]

SEQ ID NO: 502 - protein, 84 aa, Homo sapiens; identical to SEQ ID NO: 227
  SIGNAL -20..-1

SEQ ID NO: 503 - protein, 54 aa, Homo sapiens; identical to SEQ ID NO: 228
  SIGNAL -19..-1

SEQ ID NO: 504 - protein, 91 aa, Homo sapiens
  SIGNAL -19..-1
  UNSURE 29: Xaa = Met or Thr
MYGKIIFVLLLSEIVSISALSTTEVAMHTSTSSSVTKSYISSQTNGEXGQLVHRFTVPAPVVIILIILCVMAGIIGTILLISYSIRRLIKA

SEQ ID NO: 505 - protein, 114 aa, Homo sapiens; identical to SEQ ID NO: 232
  SIGNAL -32..-1

SEQ ID NO: 506 - protein, 53 aa, Homo sapiens [sequence omitted]

SEQ ID NO: 507 - protein, 108 aa, Homo sapiens; identical to SEQ ID NO: 234
  SIGNAL -40..-1

SEQ ID NO: 508 - protein, 127 aa, Homo sapiens
  SIGNAL -47..-1
  UNSURE -43: Xaa = Leu or Met
  UNSURE -42: Xaa = Lys or Thr
  UNSURE -39: Xaa = Tyr or *
  UNSURE -27: Xaa = Leu or Met
  UNSURE -22: Xaa =  Cys or *
  UNSURE 3: Xaa = Gln or Lys
  UNSURE 57: Xaa = Ile or Leu
  UNSURE 63: Xaa = Leu or Met
MFTPXXVKXAYYDTERIGVDXIMKTXFSPNRVIGLSSDLQQVGGASARIXDALSTVLQYAEDVLSGKVSADNTVGRFLMSLVNQVPKIVPDDFETMLNSNINDXLMVTYXANLTQSQIALNEKLVNL

SEQ ID NO: 509 - protein, 85 aa, Homo sapiens; identical to SEQ ID NO: 236
  SIGNAL -32..-1

SEQ ID NO: 510 - protein, 101 aa, Homo sapiens; identical to SEQ ID NO: 237
  SIGNAL -25..-1

SEQ ID NO: 511 - protein, 68 aa, Homo sapiens; identical to SEQ ID NO: 238
  SIGNAL -47..-1

SEQ ID NO: 512 - protein, 68 aa, Homo sapiens
  SIGNAL -47..-1
  UNSURE 9: Xaa = Cys or Trp
MVKSSLQRILNSHCFAREKEGDKPSATIHASRTMPLLSLHSRGGSSSESSRVSLHXCSNPGPGPRWCS

SEQ ID NO: 513 - protein, 129 aa, Homo sapiens; identical to SEQ ID NO: 243
  SIGNAL -16..-1

SEQ ID NO: 514 - protein, 109 aa, Homo sapiens
  SIGNAL -33..-1
  UNSURE 22: Xaa = Glu or Gly
  UNSURE 42: Xaa = Arg or Pro
  UNSURE 43: Xaa = Asn, Asp, Gly, or Ser
MAASGAPRILVDLLKLNVAPLAVFQMLKSMCAGQRLASEPQDPAAVSLPTSSVPXTRGRNKGSAALGGALALAEXXSREGSSQRMPRQPSATRLPKGGGPGKSPTRGST

SEQ ID NO: 515 - protein, 103 aa, Homo sapiens [sequence omitted]

SEQ ID NO: 516 - protein, 86 aa, Homo sapiens [sequence omitted]

SEQ ID NO: 517 - protein, 52 aa, Homo sapiens; identical to SEQ ID NO: 247
  SIGNAL -30..-1

SEQ ID NO: 518 - protein, 182 aa, Homo sapiens
MSATVVDAVNAAPLSGSKEMSLEEPKKMTREDWRKKKELEEQRKLGNAPAEVDEEGKDINPHIPQYISSVPWYIDPSKRPTLKHQRPQPEKQKQFSSSGEWYKRGVKENSIITKYRKGACENCGAMTHKKKDCFERPRRVGAKFTGTNIAPDEHVQPQLMFDYDGKRDRWNGYNPEEHMKIV

SEQ ID NO: 519 - protein, 147 aa, Homo sapiens; identical to SEQ ID NO: 299

SEQ ID NO: 520 - protein, 65 aa, Homo sapiens
  SIGNAL -28..-1
MNLFRFLGDLSHLLAIILLLLKIWKSRSCAAHPQLPLSFCLSVCLSVSLSLSVSLSLSFSVSKKK

SEQ ID NO: 521 - protein, 140 aa, Homo sapiens
  SIGNAL -40..-1
MVSSFRVSELQVLLGFAGRNKSGRKHDLLMRALHLLKSGCSPAVQIKIRELYRRRYPRTLEGLSDLSTIKSSVFSLDGGSSPVEPDLAVAGIHSLPSTSVTPHSPSSPVGSVLLQDTKPTFEMQQPSPPIPPVHPDVQLK

SEQ ID NO: 522 - protein, 154 aa, Homo sapiens
  UNSURE 135: Xaa = Asn, His, Pro, or Thr
  UNSURE 136: Xaa = Gln or Pro
  UNSURE 137: Xaa = Ile or Leu
  UNSURE 139: Xaa = Arg or Pro
MAEVEQKKKRTFRKFTYRGVDLDQLLDMSYEQLMQLYSARQAAAEPGPAAEAALPAEAPAQGQEGGAAHGEAGSGEDAPAGHDHPTRDGGQHGGRLQRQDLQPGGDQARDDRPLPGRVLHHLQARKAWPARHRGXXXLXLHPSQVMAQLIKAHM

SEQ ID NO: 523 - protein, 65 aa, Homo sapiens
  UNSURE 63: Xaa = Ala, Arg, Gln, Glu, Gly, Ile, Leu, Lys, Pro, Thr, Ser, Val, or *
MAEEQGRERDSVPKPSVLFLHPDLGVGGAERLVLLPFPTERRLLFCTAPRSLNSLPLKKKKIXKS

SEQ ID NO: 524 - protein, 133 aa, Homo sapiens
MEYVLEVKNSPRHLLKQFTVCDVPLYDICDYNVSRDRCQELGCCFYEGVCYKKAVPIYIHVFSALIVIIAGAFVITIIYRVIQESRKEKAIPVYVALPQKSSEKAELASSSSKLGLKLRVLGLKVLGLDESDE

SEQ ID NO: 525 - protein, 149 aa, Homo sapiens; identical to SEQ ID NO: 263

SEQ ID NO: 526 - protein, 92 aa, Homo sapiens
MPVVPALGRPRWADHLRSGVRDQPGQPGEAPPSLLKIQKLAGYGGGCLWSQLLGRLRRENHLSPGGGGCSEPRLCHCTPAWVTEQDSISKIE

SEQ ID NO: 527 - protein, 60 aa, Homo sapiens
  SIGNAL -21..-1
  UNSURE -5: Xaa = Ser or Thr
MDPNCSCAAGVSCTCAXPASAKSANAPPARRAAAPGALAPPSWTPALPCHLSVCPKEVLV

SEQ ID NO: 528 - protein, 120 aa, Homo sapiens
  SIGNAL -35..-1
MSKHLHCKVLGLPLRLEVSASCLSQSLAMSPQTHSQTCIRNLVTCINYPRTSTGCKGTTTQRIMEPVELEVEGTEQDNAKTCGSLGRGNENTMLRGGFSMNTTVGQGISKQTHHTSTTSS

SEQ ID NO: 529 - protein, 65 aa, Homo sapiens
  SIGNAL -14..-1
MLCWLKLVSITTVAIILNWAQHAENTTECAHWLSLIQVTLTSLEACQNRLVKSKPFHLQNFTCKP

SEQ ID NO: 530 - protein, 99 aa, Homo sapiens; identical to SEQ ID NO: 268

SEQ ID NO: 531 - protein, 128 aa, Homo sapiens
  UNSURE 70: Xaa = Pro or Thr
MAGNLLSGAGRRLWDWVPLACRSFSLGVPRLIGIRLTLPPPKVVDRWNEKRAMFGVYDNIGILGNFEKHXKELIRGPIWLRGWKGNELQRCIRKRKMVGSRMFADDLHNLNKRIRYLYKHFNRHGKFR

SEQ ID NO: 532 - protein, 52 aa, Homo sapiens; identical to SEQ ID NO: 270

SEQ ID NO: 533 - protein, 84 aa, Homo sapiens; identical to SEQ ID NO: 271

SEQ ID NO: 534 - protein, 80 aa, Homo sapiens; identical to SEQ ID NO: 276

SEQ ID NO: 535 - protein, 127 aa, Homo sapiens; identical to SEQ ID NO: 277

SEQ ID NO: 536 - protein, 77 aa, Homo sapiens
MAAGTSPADALCDGKKAAGPTSGAFYNELRALESLPGNYSSASTVVLLWIASRQKSQSSRNSQCSRKDKGGKQEEHE

SEQ ID NO: 537 - protein, 75 aa, Homo sapiens
  UNSURE 65: Xaa = Asp or Gly
MPGPTPSGTNVGSSGRSPSKAVAARARDPLSGRGKMPAVGQGVQAAQPRQAPGGCGDSTQKIHLXSKLALFQYWL

SEQ ID NO: 538 - protein, 56 aa, Homo sapiens; identical to SEQ ID NO: 280

SEQ ID NO: 539 - protein, 122 aa, Homo sapiens
MEASALTSSAVTSVAKVVRVASGSAVVLPLARIATVVIGGVVAMAAVPMVLSAMGFTAAGIASSSIAAKMMSAAAIANGGGVASGSLVATLQSLGATGLSGLTKFILGSIGSAIAAVIARFY

SEQ ID NO: 540 - protein, 74 aa, Homo sapiens; identical to SEQ ID NO: 297

SEQ ID NO: 541 - protein, 97 aa, Homo sapiens; identical to SEQ ID NO: 300

SEQ ID NO: 542 - protein, 98 aa, Homo sapiens
MAAEPLTELEESIENVVTTFFTFARQEGRKDSLSVNEFKELVTQQLPHLLKDVGSLDEKMKSLDVNQDSELKFNEYWRLIGELAKEIRKKKDLKIRKK

SEQ ID NO: 543 - protein, 115 aa, Homo sapiens [sequence omitted]

SEQ ID NO: 544 - protein, 102 aa, Homo sapiens
  UNSURE 85: Xaa = Asn or Asp
MAGQAFRKFLPLFDRVLVERSAAETVTKGGIMLPEKSQGKVLQATVVAVGSGSKGKGGEIQPVSVKVGDKVLLPEYGGTKVVLDXKDYFLFRDGDILGKYVD

SEQ ID NO: 545 - protein, 102 aa, Homo sapiens; identical to SEQ ID NO: 304

SEQ ID NO: 546 - protein, 116 aa, Homo sapiens
MSATAATAPPAAPAGEGGPPAPPPNLTSNRRLQQTQAQVDEVVDIMRVNVDKVLERDQKLSELDDRADALQAGASQFETSAAKLKRKYWWKNLKMMIILGVICAIILIIIIVYFST

SEQ ID NO: 547 - protein, 97 aa, Homo sapiens
  UNSURE 54: Xaa = Glu or Lys
MSLSLVFRAASYFKLVPFHSSSSNQFLQPPGWVVLTQTLVLLHFERFSYQNVPXSAQGKGNLQPETNIHLFHFLTFPKQISRNLFNSLLCLMCLTYF

SEQ ID NO: 548 - protein, 113 aa, Homo sapiens
  UNSURE 110: Xaa = Ser or Thr
MSMTDLLNAEDIKKAVGAFSATDSFDHKKFFQMVGLKKKSADDVKKVFHMLDKDKSGFIEEDELGFILKGFSPDARDLSAKETKMLMAAGDKDGDGKIGVDEFSTLVAEXKKH

SEQ ID NO: 549 - protein, 112 aa, Homo sapiens
MDPRKVNELRAFVKMCKQDPSVLHTEEMRFLREWVESMGGKVPPATQKAKSEENTKEEKPDSKKVEEDLKADEPSSEESDLEIDKEGVIEPDTDAPQEMGDENAEITAQHFL

SEQ ID NO: 550 - protein, 118 aa, Homo sapiens; identical to SEQ ID NO: 311

SEQ ID NO: 551 - protein, 109 aa, Homo sapiens
  UNSURE 10: Xaa = Arg or His
  UNSURE 38: Xaa = Ile or Phe
  UNSURE 40: Xaa = Arg or Gln
  UNSURE 97: Xaa = Leu or Phe
MDSLPSGKIXRKVKIILGRNRKENLEPNAEFDKRTEFXTXEENRICSSPVQSLLDLFQTSEEKSEFLGFTSYTEKSGICNVLDIWEEENSDNLLTAXFSSPSTSTFTGF

SEQ ID NO: 552 - protein, 103 aa, Homo sapiens
MSGDGATEQAAEYVPEKVKKAEKKLEENPYDLDAWSILIREAQNQPIDKARKTYERLVAQFPSSGRFWKLYIEAEVTILFYFFLYQYCSIHCSDRKQVRNIAN

SEQ ID NO: 553 - protein, 106 aa, Homo sapiens [sequence omitted]

SEQ ID NO: 554 - protein, 86 aa, Homo sapiens; identical to SEQ ID NO: 316

SEQ ID NO: 555 - protein, 105 aa, Homo sapiens [sequence omitted]

SEQ ID NO: 556 - protein, 101 aa, Homo sapiens
  UNSURE 86: Xaa = Leu or Val
  UNSURE 95: Xaa = Cys or Trp
MERPDKAALNALQPPEFRNESSLASTLKTLLFFTALMITVPIGLYFTTKSYIFEGALGMSNRDSYFYAAIVAVVAVHVVLALFVYXAWNEGSRQXREGKQD

SEQ ID NO: 557 - protein, 92 aa, Homo sapiens; identical to SEQ ID NO: 320

SEQ ID NO: 558 - protein, 98 aa, Homo sapiens
  UNSURE 51: Xaa = Asp or Tyr
  UNSURE 86: Xaa = Glu or *
MSVSFHTHTKELWTWMEDLQKEMLEDVCADSVDAVQELIKQFQQQQTATLXATLNVIKEGEDLIQQLRSAPPSLGEPSEARSAWAXLSSGKCLGLDVR

SEQ ID NO: 559 - protein, 89 aa, Homo sapiens [sequence omitted]

SEQ ID NO: 560 - protein, 172 aa, Homo sapiens; identical to SEQ ID NO: 324

SEQ ID NO: 561 - DNA, 528 bp, Homo sapiens
  CDS 57..527
  sig_peptide 57..143: Von Heijne matrix score 14.3000001907349 seq LLVCCLLTPGVQG/QE
  Unsure 501..503: Xaa = Gln or His
cttttttcccctgcctgcccttcgggcacctcaggaaggcaccttcctctgtcagaatggctaccatggtaccatccgtgttgtggcccagggcctgctggactctgctggtctgctgtctgctgaccccaggtgtccaggggcaggagttccttttgcgggtggagccccagaaccctgtgctctctgctggagggtccctgtttgtgaactgcagtactgattgtcccagctctgagaaaatcgccttggagacgtccctatcaaaggagctggtggccagtggcatgggctgggcagccttcaatctcagcaacgtgactggcaacagtcggatcctctgctcagtgtactgcaatggctcccagataacaggctcctctaacatcaccgtgtacaggctcccggagcgtgtggagctggcacccctgcctccttggcagccggtgggccagaacttcacccctgcgctgccaagtggaggatgggtcgccccggaccakcctcacggtggtgctgcttcgctgg

SEQ ID NO: 562 - DNA, 682 bp, Homo sapiens
  CDS 230..682
  sig_peptide 230..277: Von Heijne matrix score 13 seq LLLLLSALAGLFG/AA
gtgtttcgatacagactaagcttttaggccaaccctcctgactggatgggggcggcgggcgtggcatgcatgaaaagtaaacatcagagacctgaagaagcttataaaatagcttgggagaggccagtcaccaagacaggcatctcaaatcggctgattctgcatctggaaactgccttcatcttgaaagaaaagctccaggtcccttctccagccacccagccccaagatggtgatgctgctgctgctgctttccgcactggctggcctcttcggtgcggcagagggacaagcatttcatcttgggaagtgccccaatcctccggtgcaggagaattttgacgtgaataagtatctcggaagatggtacgaaattgagaagatcccaacaacctttgagaatggacgctgcatccaggccaactactcactaatggaaaacggaaagatcaaagtgttaaaccaggagttgagagctgatggaactgtgaatcaaatcgaaggtgaagccaccccagttaacctcacagagcctgccaagctggaagttaagttttcctggtttatgccatcggcaccgtactggatcctggccaccgactatgagaactatgccctcgtgtattcctgtacctgcatcatccaactttttcacgtggattttgcttggatcttggcaaga

SEQ ID NO: 563 - DNA, 500 bp, Homo sapiens
  CDS 72..500
  sig_peptide 72..122: Von Heijne matrix score 10.6999998092651 seq VLMLLAVLIWTGA/EN
  Unsure 1..3: n = a, g, c or t
nnngaacatctaatcgaaaacttgtttcctgagttgtcctgtgctggaggtctgctcagacgaaggtctccatggcgttagaagtcttgatgctcctcgctgtcttgatttggaccggtgctgagaacctccatgtgaaaataagttgctctctggactggttgatggtctcagttatcccagttgcagaaagcagaaatctgtatatatttgcggatgaattacatctgggaatgggctgccctgcaaatcggatacatacatatgtatatgagtttatatatcttgttcgtgattgtggcatcaggacaagggtagtttctgaggaaactctcctttttcaaaccgagctgtactttaccccaaggaatatagatcatgaccctcaggaaatccatttggagtgttccacctctaggaaatcagtgtggcttacaccagtttctactgagaatgaaataaaattggatcctagtccttttattgctgactttcagaca

SEQ ID NO: 564 - DNA, 497 bp, Homo sapiens
  CDS 52..495
  sig_peptide 52..102: Von Heijne matrix score 10.6999998092651 seq VLMLLAVLIWTGA/EN
cttgtttcctgagttgtcctgtgctggaggtctgctcagacgaaggtctccatggcgttagaagtcttgatgctcctcgctgtcttgatttggaccggtgctgagaacctccatgtgaaaataagttgctctctggactggttgatggtctcagttatcccagttgcagaaagcagaaatctgtatatatttgcggatgaattacatctgggaatgggctgccctgcaaatcggatacatacatatgtatatgagtttatatatcttgttcgtgattgtggcatcaggacaagggtagtttctgaggaaactctcctttttcaaaccgagctgtactttaccccaaggaatatagatcatgaccctcaggaaatccatttggagtgttccacctctaggaaatcagtgtggcttacaccagtttctactgagaatgaaataaaattggatcctagtccttttattgctgactttcagacaacagcagaagagttagg

SEQ ID NO: 565 - DNA, 342 bp, Homo sapiens
  CDS 118..342
  sig_peptide 118..189: Von Heijne matrix score 10.6000003814697 seq LLLLLLCPAHVGG/LW
  Unsure 340..342: Xaa = Glu or Lys
tccccggccgccgccgttgcgctcgccgcgctcgcactgaagcccgggccctcgcgcgccgcggttcgccccgcagcctcgccccctgcccacccgggcggccgtagggcggtcacgatgctgccgcccttaccctcccgcctcgggctgctgctgctgctgctcctgtgcccggcgcacgtcggcggactgtggtgggctgtgggcagccccttggttatggaccctaccagcatctgcaggaaggcacggcggctggccgggcggcaggccgagttgtgccaggctgagccggaagtggtggcagagctggctcggggcgcccggctcggggtgcgarag

SEQ ID NO: 566 - DNA, 434 bp, Homo sapiens
  CDS 242..433
  sig_peptide 242..307: Von Heijne matrix score 10.1999998092651 seq LLALAALLQGAVS/LK
acatttgccccagggaaggtcacagctgcctgaactbbtcaaaactcccagacacgcactgcctgtgcaggatccggagcccagcagcactgccagggccttgaagtgcttattcagagacctttcttcatagactacttttttttctttaagcagcaaaaggagaaaattgtcatcaaaggatattccagattcttgacagcattctcgtcatctctgaggacatcaccatcatctcaggatgaggggcatgaagctgctgggggcgctgctggcactggcggccctactgcagggggccgtgtccctgaagatcgcagccttcaacatccagacatttggggagaccaagatgtccaatgccaccctcgtcagctacattgtgcagatcctgagccgctatgacatcgccctggtccaggaggtcagagaca

SEQ ID NO: 567 - DNA, 487 bp, Homo sapiens
  CDS 136..486
  sig_peptide 136..234: Von Heijne matrix score 8.5 seq FFFVLGSLIFCFG/IW
  Unsure 478..480: Xaa = Glu or Gly
ctcttttggggttcttcctttctctctcagctctccgtctctctttctctctcagcctctttctttctccctgtctcccccactgtcagcacctcttctgtgtggtgagtggaccgcttaccccactaggtgaagatgtcagcccaggagagctgcctcagcctcatcaagtacttcctcttcgttttcaacctcttcttcttcgtcctcggcagcctgatcttctgcttcggcatctggatcctcattgacaagaccagcttcgtgtcctttgtgggcttggccttcgtgcctctgcagatctggtccaaagtcctggccatctcaggaatcttcaccatgggcatcgccctcctgggttgtgtgggggcctcaaggagctccgctgcctcctgggcctgtattttgggatgctgctgctcctgtttgccacacagatcaccctgggaatcctcatctccactcagcgggccagctgragcgaagc

SEQ ID NO: 568 - DNA, 478 bp, Homo sapiens
  CDS 233..478
  sig_peptide 233..328: Von Heijne matrix score 8.19999980926514 seq LVAAMVLLSVVFC/LY
  Unsure 431..433: Xaa = Gln or His
atgaatgtcagaataggcccattctaccagctctggctgagcctgagcttccaaaagtgagctgagctgttcaaccttggatcttaattactcctagcagggataattaggtccctctttctcagattacaggtttgagaagttccaaatatccgatgccctagaggtttttttcccttaattttattgttacaattggccttcatctagctctggatggttgaactgtagcatggcaaagatgtttgatctcaggacgaagatcatgatcggcatcggaagcagcttactggttgccgcgatggtgctcctaagtgttgtgttctgtctttacttcaaagtagctaaggcactaaaagctgcaaaggaccctgatgctgtggctgtaaaaaatcacaacccagacaaggtgtgttgggccacgaacagccakgccaaagccaccaccatggagtcttgtccatctctccagtgctgt

SEQ ID NO: 569 - DNA, 469 bp, Homo sapiens
  CDS 290..469
  sig_peptide 290..346: Von Heijne matrix score 7.5 seq LAVFFLVSTQLFA/EE
agatgttatgggcatcgacgagttaccgtctcggaaactctcaatcacgcaagcgaaaggagaggaggcggctaattaaatattgagcagaaagtcgcgtggggagaatgtcacgtgggtctggaggctcaaggaggctgggataaataccgcaagcactgagcaggcgaaagagcgcgctcggacctccttcccggcggcagctaccgagagtgcggasgaccagcgtgcgctcggaggaaccagagaaactcagcaccccgcgggactgtccgtcgcaaaatccaacatgaaaatcctcgtggccttggcagtcttttttcttgtctccactcagctgtttgcagaagaaataggagccaatgatgatctgaattactggtccgactggtacgacagcgaccagatcaaggaggaactgccggagccctttgagcatcttctgcagagaatcgcccggagacccaag

SEQ ID NO: 570 - DNA, 489 bp, Homo sapiens
  CDS 253..489
  sig_peptide 253..336: Von Heijne matrix score 7.40000009536743 seq CLLLNLAPAPLNA/DS
ctctttgctctaacagacagcagcgactttaggctggataatagtcaaattcttacctcgctctttcactgctagtaagatcagattgcgtttctttcagttactcttcaatcgccagtttcttgatctgcttctaaaagaagaagtagagaagataaatcctgtcttcaatacctggaaggaaaaacaaaataacctcaactccgttttgaaaaaaacattccaagaactttcatcagagattttacttagatgatttacacaatgaagaaagtacatgcactttgggcttctgtatgcctgctgcttaatcttgcccctgcccctcttaatgctgattctgaggaagatgaagaacacacaattatcacagatacggagttgccaccactgaaacttatgcattcattttgtgcattcaaggcggatgatggcccatgtaaagcaatcatgaaaagattttcttcaatattttcactcgacagtgcg

SEQ ID NO: 571 - DNA, 484 bp, Homo sapiens
  CDS 256..483
  sig_peptide 256..327: Von Heijne matrix score 7.09999990463257 seq FLFLFNLIFFILG/AV
ggggcggggcctgccgagtccgcggcgttccccggctgcagccgggagggggccgaggagtgactgagccccgggctgtgcagtccgacgccgactgaggcacgagcgggtgacgctgggcctgcagcgcggagcagaaagcagaacccgcagagtcctccctgctgctgtgtggacgacacgtgggcacaggcagaagtgggccctgtgaccagctgcactggtttcgtggaaggaagctccaggactggcgggatgggctcagcctgtatcaaagtcaccaaatactttctcttcctcttcaacttgatcttctttatcctgggcgcagtgatcctgggcttcggggtgtggatcctggccgacaagagcagtttcatctctgtcctgcaaacctcctccagctcgcttaggatgggggcctatgtcttcatcggcgtgggggcagtcactatgctcatgggcttcctgggctgcatcggcg

SEQ ID NO: 572 - DNA, 482 bp, Homo sapiens
  CDS 29..481
  sig_peptide 29..82: Von Heijne matrix score 7 seq VLGLVLLSVTVQG/KV
  Unsure 431..433: Xaa = Ser or Thr
agcctagcactctgacctagcagtcaacatgaaggctctcattgttctggggcttgtcctcctttctgttacggtccagggcaaggtctttgaaaggtgtgagttggccagaactctgaaaagattgggaatggatggctacaggggaatcagcctagcaaactggatgtgtttggccaaatgggagagtggttacaacacacgagctacaaactacaatgctggagacagaagcactgattatgggatatttcagatcaatagccgctactggtgtaatgatggcaaaaccccaggagcagttaatgcctgtcatttatcctgcagtgctttgctgcaagataacatcgctgatgctgtagcttgtgcaaagagggttgtccgtgatccacccacctcggcctcccaaagtgctgggattacaggcgtgascaactgcgcccggccacattcagttcttatcaaagaaataacccagactt

SEQ ID NO: 573 - DNA, 541 bp, Homo sapiens
  CDS 294..539
  sig_peptide 294..380: Von Heijne matrix score 7 seq LLMLFHTMAQIMA/EQ
ataactatgtgacattacttagggcataattctaaaatttctgtcctaggagacactagataactctcaaaaacttctgattttcttgcatccctttttggcagagtggtcacagtataatgcgggaggccctcctcccccgaatcagcaacaatttttgctccaccgttttctttcgggaacagatgcgttttcagaagacagtactccagtgataagcggcgactttgagggattccctctctggcggcctctgcagcagcacagccggcctcattcggggcactgcgagtatggatctccaaggaagaggggtccccagcatcgacagacttcgagttctcctgatgttgttccatacaatggctcaaatcatggcagaacaagaagtggaaaatctctcaggcctttccactaaccctgaaaaagatatatttgtggtgcgggaaaatgggacgacctgtctcatggcagagtttgcagccaaatttattgtaccttatgatgtgtgggccagcaactacgtagatctgatcacaga

SEQ ID NO: 574 - DNA, 453 bp, Homo sapiens
  CDS 274..453
  sig_peptide 274..345: Von Heijne matrix score 6.59999990463257 seq KMVHLLVLSGAWG/MQ
attattggttgggggaaaccacgaggggacgcggccgaggagggtcgctgtccacccgggggcgtgggagtgaggyaccagattcagcccatttggccccgacgcctctgttctcggaatccgggtgctgcggattgaggtcccggttcctaacgaatctctgctggattggccgtaaccctgtccccgagcgggctcacagggtctgaaggccacgcaygaggcaaaggyaaagyycygagccacccggtgchtcsttcccaggascgcaagatggaggaaggcgggaacctaggaggcctgattaagatggtccatctactggtcttgtcaggtgcctggggcatgcaaatgtgggtgaccttcgtctcaggcttcctgcttttccgaagccttccccgacataccttcggactagtgcagagcaaactcttccccttctacttccacatc

SEQ ID NO: 575 - DNA, 497 bp, Homo sapiens
  CDS 70..495
  sig_peptide 70..147: Von Heijne matrix score 6.09999990463257 seq IGLASLFTENVLA/HP
  Unsure 286..288: Xaa = Arg or Gly
ataggatgaaaccatggaagtcttsctsagatctggggagggagcctggcccaagagcccgtggagctaatgaaaacagaacagctgaatagatttgctggatttggtattggacttgcaagtctctttacagaaaatgtattggcacatccttgcattgttctacgccgccaatgtcaggttaattaccatgctcagcattaccatctcactccatttacagtcatcaatattatgtacagtttcaacaaaactcagggacctagagccctgtggaaaggaatgrgaagtacatttattgtccagggagtcacacttggagcagaaggcataattagtgaatttacacctttgccaagggaggttttacataaatggagtcctaaacaaataggagaacaccttctactgaaatccctaacttacgtggtggcaatgcttttttattcagcaagtctgattgaaacagtgcagagtgagataattcgagataataa

SEQ ID NO: 576 - DNA, 467 bp, Homo sapiens
  CDS 88..465
  sig_peptide 88..219: Von Heijne matrix score 6.09999990463257 seq ACCLVMVISCVFC/MG
tcttacaccaacctgctccaaaccacaagaggagttacttgttccagcctcctgtgtggactgctttcctatcaaagcaccttagacatgcacgaggaagaaatatacacctctcttcagtgggatagcccagcaccagacacttaccagaaatgtctgtcttccaacaaatgttcaggagcatgctgtcttgtgatggtgatttcatgtgttttctgcatgggattattaacggcatccattttcttgggcgtcaagttgttgcaggtgtccaccattgcgatgcagcagcaagaaaaactcatccaacaagagagggcactgctaaactttacagaatggaagagaagctgtgcccttcagatgaaatattgccaagccttcatgcaaaactcattaagttcagcccataacagcagtccttgtccaaacaattggattcagaacagagaaagttgttactatgt

SEQ ID NO: 577 - DNA, 485 bp, Homo sapiens
  CDS 328..483
  sig_peptide 328..387: Von Heijne matrix score 5.90000009536743 seq GWMAAGLMIGAGA/CY
ctagagcacaagtcctgctagtcgcctccgtctgggtaccagccccctattactctgcaggcgtgtgaagaaagaaggaaactagctcggaccgtgcaggtttgtaggtctgttggcctgtaggtttcggcacaagtttcagcgagagaaggagaaaactgccttggttggaaccttgcagattcatcacaagagagctacaagagcctggaagaagctgaagactgctaccctccatccttactcaccctggacctgagagacctcttcaatcaggtggagcaaggccctctcctgtcctgccccaaggctggcacagacttgagcatgggccgggctcgggaagtgggttggatggcggcaggactgatgattggggctggtgcctgctactgcgtttacaaactgaccataggaagagatgacagtgagaagctggaggaggagggggaagaggagtgggacgatgaccaggagctggatga

SEQ ID NO: 578 - DNA, 502 bp, Homo sapiens
  CDS 39..500
  sig_peptide 39..83: Von Heijne matrix score 5.90000009536743 seq ILMLTFIICGLLT/RV
attcctcaggacacagagcttcctctctcccaggagccatgaatatcctgatgctgaccttcattatctgtgggttgctaactcgggtgaccaaaggtagctttgaaccccaaaaatgttggaagaataatgtaggacattgcagaagacgatgtttagatactgaaaggtacatacttctttgtaggaacaagctatcatgctgcatttctataatatcacatgaatatactcgacgaccagcatttcctgtgattcacctagaggatataacattggattatagtgatgtggactcttttactggttccccagtatctatgttgaatgatctgataacatttgacacaactaaatttggagaaaccatgacacctgagaccaatactcctgagactactatgccaccatccgaggccactactcccgagactactatgccaccatctgagactgctacttccgagactatgccaccaccttctcagacagctcttactca

SEQ ID NO: 579 - DNA, 754 bp, Homo sapiens
  CDS 259..753
  sig_peptide 259..375: Von Heijne matrix score 5.80000019073486 seq FCVCVIAIGVVQA/LI
aagctcccggccgggctgactcaagcggaggcgcgcggaacagtcgccgaggcgattcccgcccagcagttcgacagaagtgtacagaggcttctggcaacacggattgccgtctacctgatgacctttctcatcgtgacagtggcctgggcagcacacacaaggttgttccaagttgttgggaaaacagacgacacacttgccctgctcaacctggccgcatcatggctgtgatgccctccctccctccaggcctgcatgatgaccatcaccttcctgccttacacgttttcgttaatggtgaccttccctgatgtgcctctgggcatcttcttgttctgtgtgtgtgtgatcgccatcggggtcgtgcaggcactgattgtrgggtacgcattccacttcccgcacctgctgagcccgcagatccagcgctctgcccacagggctctgtaccgacgacacgtcctgggcatcgtcctccaaggcccggccctgtgctttgcagcggccatcttctctctcttctttgtccccttgtcttacctgctgatggtgactgtcatcctcctcccctatgtcagcaaggtcaccggctggtgcagagacaggctcctgggccacagggagccctcggctcacccagtggaagtcttctcgtttgacctccacgagccactcagcaaggagcgcgtggaagccttcagcgacggagtctacgccatcgtggccacgcttctcatcctggacatctggt

SEQ ID NO: 580 - DNA, 488 bp, Homo sapiens
  CDS 54..488
  sig_peptide 54..119: Von Heijne matrix score 5.80000019073486 seq PVTLTSLLPMVTX/GP
  Unsure 181: n = a, g, c or t
  Unsure 256: n = a, g, c or t
  Unsure 369: n = a, g, c or t
  Unsure 117..119: Xaa = Ala or Ser
  Unsure 180..182: Xaa = Asn, Cys, Ile, Phe, Ser, Thr, or Tyr
  Unsure 255..257: Xaa = Cys, Phe, Ser, Tyr
  Unsure 369..371: Xaa = Ala, Pro, Ser, Thr
gtctttttaatctctgcagtcccctgagtgtcacccaacctgcaggcagtgtcatgggccgttggagtctgactgcatctcctgttaccctcacatctctcttaccaatggtaactkcaggaccagctgcagggaagagcagttcctcaacctcgtgggatactgtgctgactgccatcwnctgtgccagcactgtgcagctgatctccacaacactgggagcatctgcctcaggtgccagaatgcccactacctnctgctcggggaccactgtgttcctgactgcccttcaggatactatgcagagagaggagcttgtaaaaaatgccactcctcctgcagaacctgccagggcagaggacctttctnctgctcctcatgtgacaccaacctcgtgctgtcccacactggcacctgcagcaccacctgcttccctgggcactatcttgatgacaatcatgtttgccagcgtaggtttttccaatgaa

SEQ ID NO: 581 - DNA, 343 bp, Homo sapiens
  CDS 17..343
  sig_peptide 17..106: Von Heijne matrix score 5.69999980926514 seq LGVNLVVMPPTRA/RS
  Unsure 230..232: Xaa = Arg or Lys
  Unsure 278..280: Xaa = Leu or Val
  Unsure 296..298: Xaa = Ile or Met
atagattacaacggtgatggcgggcaagcggtccggctggagccgggcggctctcctccagctccttctcggcgtgaacctggtggtgatgccgcccacccgggcccggagtctgcgcttcgttaccttggaggggatgctacagcactgggaactgggccaggccctgcggcagcgctatcacggcttcctaaacacctcttatcaccggcaagaggtttatgtgcgaargtactttgaccggactctcatgagtgctgaggccaacctggctggastcttccctcccaacgggatkcagcgcttcaacccgaacatctcgtggcagcctattcctgtgcac

SEQ ID NO: 582 - DNA, 465 bp, Homo sapiens
  CDS 293..463
  sig_peptide 293..388: Von Heijne matrix score 5.59999990463257 seq WMGLACFRSLAAS/SP
aaaagattgaagaggaactctttcaaacctttcaagtgccccctcctttccttaaagtcttttataggggtccccttcttggccatctccatcctgtgagtcaggactgaaagggcacagacaggtcactgccagcattgttggggcaagcctgcaagcacgcatcactggggatctgacatgacaatggccgcctgccccctctgagggctacaggacttaccccagtgggaagcagctaagcaggtctgaccagccgacctggacctggccaagggtcctgtcatccctcatggccaccccgccattccggctgataaggaagatgttttccttcaaggtgagcagatggatggggcttgcctgcttccggtccctggcggcatcctctcccagtattcgccagaagaaactaatgcacaagctgcaggaggaaaacgcttttcgcgaagagatgaaaatttt

SEQ ID NO: 583 - DNA, 539 bp, Homo sapiens
  CDS 302..538
  sig_peptide 302..358: Von Heijne matrix score 5.40000009536743 seq LCCSGCVPSLCCS/SY
aaaaacttccgccgccgcgtccgccgcctccggaactaaacggggtgaggtcacattcggttatctctaacgttggaaaacgatggagctaacacccattatggagattaaccacttttcatcaggtttttaacttaagtcgtgaggaatacaacggtgaacacaagattcattttattttcatcaccatgggacgtatcctgttgttgagtwctctgggtcagacctctgaagacttctcagatggatcctagtctctgggcttgcctgaaattactcgctgctcagggagagagttgaaatggttggcatcctcccactctgttgctccggctgtgtcccctcgctctgttgttccagctatgtcccctctgttgctccaactgcagctcattctgttagagttcctcattcagctggtcactgtggccagagggtgttggcctgctcccttcctcaagtattcttaaagccatggatttttgtggagcatttttcttcctggctctcccttgagttattttcctttcttcgctatc

SEQ ID NO: 584 - DNA, 526 bp, Homo sapiens
  CDS 85..525
  sig_peptide 85..144: Von Heijne matrix score 5.19999980926514 seq SPVFLVFPPEITA/SE
cctartcgaaaaacaagaaaagaacatggtctagactgaagtaccaactaaatcatctcctttcaaattatcaccgacaccatcatggattcaagcaccgcacacagtccggtgtttctggtatttcctccagaaatcactgcttcagaatatgagtccacagaactttcagccacgaccttttcaactcaaagccccttgcaaaaattatttgctagaaaaatgaaaatcttagggactatccagatcctgtttggaattatgaccttttcttttggagttatcttccttttcactttgttaaaaccatatccaaggtttccctttatatttctttcaggatatccattctggggctctgttttgttcattaattctggagccttcctaattgcagtgaaaagaaaaaccacagaaactctgataatattgagccgaataatgaattttcttagtgccctgggagcaatagctggaatcattctcctcacatttgggtttcatcctagatcaaaactacatttgt

SEQ ID NO: 585 - DNA, 482 bp, Homo sapiens
  CDS 195..482
  sig_peptide 195..293: Von Heijne matrix score 5.09999990463257 seq LYALVQLGQPCDC/LP
gcacagatgaccggaagcgtgccctggcggcgctgccagccccagctgggagctggtaggggagtgcgaggaaggcgggacgcagggcggagccgctgcaggggcggggcctgcggacaggagccggggtttggggcgggaacccctcgtcccctgcagaccccgcctgctcgggcgcgggcggcggcgcggccatgaagctgaagctgaagaacgtgtttctcgcctacttcctggtgtcgatcgccggcctcctctacgcgctggtacagctcggccagccatgtgactgccttcctcccctgcgggcagcagcsgagcagctacggcagaaggatctgaggatttcccagctgcaagcggaactccgacggccaccccctgcccctgcccagccccctgaacccgaggccctgcctactatctatgttgttacccccacctatgccaggctggtacagaaggcagagctggtacgactg

SEQ ID NO: 586 - DNA, 543 bp, Homo sapiens
  CDS 35..541
  sig_peptide 35..82: Von Heijne matrix score 5 seq CGLFLRTTAAARA/CR
agactgaggctgaggctggggaacatcgggcagcatgagcggctgcgggctcttcctgcgcaccacggctgcggctcgtgcctgccggggtctggtggtctctaccgcgaaccggcggctactgcgcaccagcccgcctgtacgagctttcgccaaagagcttttcctaggcaaaatcaagaagaaagaagttttcccatttccagaagttagccaagatgaacttaatgaaatcaatcagttcttgggacccgtggaaaaattcttcactgaagaggtggactcccgaaaaattgaccaggaagggaaaatcccagatgaaactttggagaaattgaagagcctagggctttttgggctgcaagtcccagaagaatatggtggcctgggcttctccaacaccatgtactcacgactaggggagatcatcagcatggatgggtccatcactgtgaccctggcagcgcaccaggctattggctcaaggggatcatcttggctggcactgaggagcagaaagccaaataacttgcctaaactggc

SEQ ID NO: 587 - DNA, 473 bp, Homo sapiens
  CDS 64..471
  sig_peptide 64..171: Von Heijne matrix score 4.80000019073486 seq LLLLRLNDAALRA/LQ
aggaggtggcggtggtggccctcgcctgtggcccccgtgctgcttgcactcgaactcgtcgccatggaggagctccaggagcctctgagaggagagctccggctctgcttcacgcaagctgcccggactagcctcttactgctcaggctcaacgacgctgccctgcgggcgctgcaagagtgtcagcggcaacaggtacggccggtgattgctttccaaggccaccgagggtatctgagactcccaggccctggttggtcctgcctcttctccttcatagtgtcccagtgttgtcaggagggcgctggtggtagcttggaccttgtgtgccaacgcttcctcaggtctgggcctaacagcctccactgcctgggctcactcagggagcgcctcattatttgggcagccatggattctatcccagccccatcatcagttcagggacacaayctgactgaagatgccagacatcc

SEQ ID NO: 588 - DNA, 509 bp, Homo sapiens
  CDS 183..509
  sig_peptide 183..251: Von Heijne matrix score 4.59999990463257 seq GHSLVGLALLCIA/AN
  Unsure 492..494: Xaa = Pro or Ser
aggaccaatgaaagcaaagtacctcatcccctcagtgactaagaatcgcagtatttaagaggtagcaggaatgggctgagagtggtgtttgctttctccaccagaagggcacactttcatctaatttggggtatcactgagctgaagacaaagagaagggggagaaaacctagcagaccaccatgtgctatgggaagtgtgcacgatgcatcggacattctctggtggggctcgccctcctgtgcatcgcggctaatattttgctttactttcccaatggggaaacaaagtatgcctccgaaaaccacctcagccgcttcgtgtggttcttttctggcatcgtaggaggtggcctgctgatgctcctgccagcatttgtcttcattgggctggaacaggatgactgctgtggctgctgtggccatgaaaactgtggcaaacgatgtgcgatgctttcttctgtattggctgctctcattggaattgcaggayctggctactgtgtcatt

SEQ ID NO: 589 - DNA, 523 bp, Homo sapiens
  CDS 302..523
  sig_peptide 302..352: Von Heijne matrix score 4.59999990463257 seq LLPLCQRIHCIIG/RF
agatgagtgttcagctctcagcagagaggttagctcctctctgcagcttgtcctgttgtctcctcaagtctggctgagtccggagtttttatgagcctcagaggggaggaagtgcatgctgattaatccatgggcaggcctggaaaagttcccactccagtctgcgggacccacagcctggccctcaggctcaggcttcccwggcttgaagattgggcttcacctgggacctaccccttctgcctaggagcatgtctgcctcctgctgcctttcatggtgcccagccaaggctaagtcgaaatgtggcccaaccttcttcccctgtgccagcggatccattgcatcattggtcgcttccggtgcaatgggtttgaggactgtcccgatggcagcgatgaagagaactgcacagcaaaccctctgctttgctccaccgcccgctaccactgcaagaacggcctctgtattgacaagagcttcatctgcgatggacagaataactgtcaagacaacagtgatgag

SEQ ID NO: 590 - DNA, 513 bp, Homo sapiens
  CDS 103..513
  sig_peptide 103..243: Von Heijne matrix score 4.40000009536743 seq MATMLQLVPLLKA/SI
  Unsure 502..504: Xaa = Arg or Pro
aatcattacagaaggatttggcctctaagggcctctggaattctttggaagaaggcattggctgtgtagctgacactctactcactgtggacatggacgtccatgaccctgcagtggcacttgtatgagatggcacgcaacctgaaggtgcaggatatgctgcgggcagaggtcttggctgcgcggcaccaggcccagggagacatggccacgatgctacagctggtccccctcctcaaagccagcatcaaggagacactaagacttcaccccatctccgtgaccctgcagagatatcttgtaaatgacttggttcttcgagattacatgattcctgccaagacactggtgcaagtggccatctatgctctgggccgagagcccaccttcttcttcgacccggaaaattttgacccaacccgatggctgagcaaagacaagaacatcacctacttccggaacttgggctttggctggggtgtgcggcagtgtctgggacggcsgatcgctgag

SEQ ID NO: 591 - DNA, 490 bp, Homo sapiens
  CDS 196..489
  sig_peptide 196..255: Von Heijne matrix score 4.30000019073486 seq LLDSSLMASGTAS/RS
agacgtacctcacggaagccggctttggccctgcggctgctaccgtcgccgcggagaaattgttggatctggcagtctaggaatgaatctcctctcagcctttaagctcacctggtcagaatccttggatgagcctgtgggaccgttcctcctagcccggtggtttggaaccagtggctttgggactgtaagaggatggacaaagattctcaggggctgctagattcatccctgatggcatcaggcactgccagccgctcagaggatgaggagtcactggcagggcagaagcgagcctcctcccaggccttgggcaccatccctaaacggagaagctcctccaggttcatcaagaggaagaagttcgatgatgagctggtggagagcagcctggcaaaatcttctacccgggcaaagggggccagtggggtggaacagggcgctgttcgggtagtgaaccctcctccagtgagaagaagaaggtatcaaa

SEQ ID NO: 592 - DNA, 537 bp, Homo sapiens
  CDS 197..535
  sig_peptide 197..304: Von Heijne matrix score 3.79999995231628 seq WLGCIVFPFSALL/QQ
cctttttaaacaatatccattctcttgatgtctacaatatcacctttcttatagattcgcatatacatggccaaaggaacaactccatgttttctaaaaggcctagagaacatacatcagctcaccaggacatgattatagcttctcaagcttatctaaaataaaagataacatatatatcaacatttttgatgaaatgatgactgaaaaacatgaggatcactgtctcaagagctgtagtggtcactcatatataagaaagaattggcttggatgcattgtcttccctttttctgctcttctgcaacaatctgagattagtggaacatttcaagtaactattccaccagttttgctcgggtatacttggagtaatacttatgtatttcctaaagaagattccaatgagcagaatttaaaagaatgtacattcttaaatatttttgctaccattgaacctcaaatatcatatgtcacctgtaatccaacactagataagtttttagatcaaacagaggtcttgcagagagcacagat

SEQ ID NO: 593 - DNA, 488 bp, Homo sapiens
  CDS 79..486
  sig_peptide 79..201: Von Heijne matrix score 3.59999990463257 seq LHTSVTLFLLSYC/DC
  Unsure 472..474: Xaa = Leu or Phe
agatgattccctgattctccagagagattacacacttcgtttgtggctaaggttactgtgacccaatgaaagaagaaaatgaaagccataaagaaaagtcttacagaagaagaatacctgtacctggacttttctcaccaaacagaaggatgcatctttcctcttcatacatctgtaactttatttctgttatcttactgtgactgtaaaatctttaaaatttgcttagttgtcaccaaagaggtgagtagagatagttcactactaagagatgacctgatccaggatgttgaaatacagattatttcaaggcaggagctcccaccaatagtccaaaattgctgtttgcctgcagtagtagaacgatcagacaatttttgtagagcaggacttgctgttgtattgagacacataatccagaaatcctatgaagcagaccccttaaagaaggaacttttggaacttctgggcttwaaaagacttgcttg

SEQ ID NO: 594 - DNA, 490 bp, Homo sapiens
  CDS 80..490
  sig_peptide 80..127: Von Heijne matrix score 3.59999990463257 seq FSLLSISGPPISS/SA
  Unsure 296..298: Xaa = Asp or Gly
  Unsure 299..301: Xaa = Cys or Ser
gaatgtttatcctctggacaaaccagccagcctctccagagcaggcgtgtgatctctgtacccccgcagtggtcagaatatggagaacttctcactcctcagcatctctggacctccaatctcttcctccgccctgagtgcttttcccgacattatgttctctcgtgccaccagcctgccagacattgcaaagacagcagtacccactgaggcatccagcccagctcaggccctgccaccccagtaccaaagcatcattgtcaggcaagggatacagaacacagtgctctcaccagrcwgcagcttgggggacacccagcacggagagaagctgaggcggaactgcactatctaccggccctggttctccccctacagctacttcgtgtgtgcagacaaagagagccagctggaggcctatgacttcccagaggtgcagcaggatgagggcaagtgggacaactgcctttctgaggacatggctgagaac

SEQ ID NO: 595 - DNA, 495 bp, Homo sapiens
  CDS 157..495
  Unsure 256..258: Xaa = Ala or Glu
attctttcgacaggagttgaaaccagcaccttccctttctctgagtcctgcctccttctgcagaagggagctcaaaagaactttgttgttttgccttttactctggggtgaaagcggcaggaggtatgtgagatggtgaaatgatttgcttctgccatgctggggtcacgggtggatcgccctaaactctcggtggccccctcagtagttttggaagaggaccaagtccttgtctctccagcagtggacctggaagmaggatgccggctcagggacttcactgagaaaataatgaatgtcaaaggaaaagtaattctgtcaatgctggttgtctcaactgtgatcattgtgttttgggaatttatcaacagcacagaaggctctttcttgtggatatatcactcaaaaaacccagaagttgatgacagcagtgctcagaagggctggtggtttctgagctggtttaacaatgggatccacaattatcaacaaggg

SEQ ID NO: 596 - DNA, 939 bp, Homo sapiens
  CDS 416..937
aaaaggagtagctattagccaattcggcagggcccgctttttagaagcttgatttcytttgaagatgaaagactagcggaagctctgcctctttccccagtggcgagggaactcggggcgattggctgggaactgtatccacccaaatgtcaccgatttcttcctatgcaggaaatgagcagacccatcaataagaaatttctcagcctggccgaaaatggttggccccacgaagccacgacaactggaggcaaagagggttgctcaacgccccgcctcattggaaaaccaaatcagatctgggacctatatagcgtggcggaggcggggcgatgattgtcgcgctcgcacccactgcagctgcgcacagtcgcatttctttccccgcccctgagaccctgcagcaccatctgtcatggcggctgggctgtttggtttgagcgctcgccgtcttttggcggcagcggcgacgcgagggctcccggccgcccgcgtccgctgggaatctagcttctccaggactgtggtcgccccgtccgctgtggcgggaaagcggcccccagaaccgaccacaccgtggcaagaggacccagaacccgaggacgaaaacttgtatgagaagaacccagactcccatggttatgacaaggaccccgttttggacgtctggaacatgcgacttgtcttcttctttggcgtctccatcatcctggtccttggcagcacctttgtggcctatctgcctgactacaggatgaaagagtggtcccgccgcgaagctgagaggcttgtgaaataccgagaggccaatggcttcccatcatggaatccaactgcttcgaccccagcaagatccagctgccagaggatgagtgaccagttgctaagtggggctcaagaagcaccgccttccccaccccctgcctgccattctgacct

SEQ ID NO: 597 - DNA, 528 bp, Homo sapiens
  CDS 51..527
aagctgggggagctcgtcgccgccgccggcggctagcgggcgtccgcgccatggagcgctacgcggccgccttggaggaggtggcggacggtgcccggcagcaggagcgacactaccagttgctgtcggcgctacagagcctggtgaaggagttgcccagctctttccagcagcgcctgtcctacaccacgctcagcgacctggccctggcgcttctcgacggcactgtgttcgaaatcgtgcaggggctactggagatccagcacctcaccgaaaagagcctgtacaaccagcgcctgcgcctacagaacgagcaccgagtgctcaggcaggcgctgcggcagaagcaccaggaagcccagcaggcctgccggccccacaacctgcctgtggttcaggcggctcagcagcgagaactagaggccgtggaacaccggatccgtgaggagcagcgggcgatggaccataagatcatcctggagctggaccggaaggtggctgaccagcagagcacactggagaaggcgg

SEQ ID NO: 598 - DNA, 556 bp, Homo sapiens
  CDS 128..556
cttctttggccctgtgacacgtagcaacggggctggttcagggtctgaaacagagtttgggggttgtttgggattagtgaagctactgcctttgccgccagcgcasctcagagtttgattatttgcaatgtcaggctttgaaaacttaaacacggatttctaccagacaagttacagcatcgatgatcagtcacagcagtcctatgattatggaggaagtggaggaccctatagcaaacagtatgctggctatgactattcgcagcaaggcagatttgtccctccagacatgatgcagccacaacagccatacaccgggcagatttaccagccaactcaggcatatactccagcttcacctcagcctttctatggaaacaactttgaggatgagccacctttattagaagagttaggtatcaattttgaccacatctggcaaaaaacactaacagtattacatccgttaaaagtagcagatggcagcatcatgaatgaaactgatttggcaggtccaatggttttttgccttgctttttggagcacattgctactg

SEQ ID NO: 599 - DNA, 564 bp, Homo sapiens
  CDS 151..564
ataacaaaacaatccaactatactgaataatacagaatcaaactgggatccaaaaacaatttaaaacaaagttggaaactcaaccgaaacaagaacaaatcgaatccgacatgaaacaagtctcacaagtgttcttaagctgacagaaagatggtcaaaaccaaacttaaaaccgtagtaatcgacataacggtcataccattcgccgacgattttttctgccctggagctccagccggcgtagagatatcaccagcggctgatggaccatctcctgaaggacccatcgccgagcctgacggagaatctgacggtgaagaagaagtagagcctcccggagccaacgatggagaaacggtgggtgagtttgaaacaggggatgaagatttaggtgccattgatccaggtggtgaagtcatcggagcagaagacggaggaatagttgaagatgatttaggtgccattggtgccggcggtgaagtcatcggagcagaggatggggaaacaggggacgtggatttaggtggtgccggtggtgaagtcgtcggagaaacaggggagctc

SEQ ID NO: 600 - DNA, 421 bp, Homo sapiens
  CDS 198..419
  Unsure 275..278: n = a, g, c or t
  Unsure 273..275: Xaa = Asn, Ile, Lys, or Met
  Unsure 276..278: Xaa = any one of the twenty amino acids
  Unsure 279..281: Xaa = Asn, His, or Tyr
  Unsure 354..356: Xaa = Ala, Asp, Glu, Leu, Phe, Ser, Tyr, Val, or *
cttttacttcaggcgaacctgaactcagttaatgcaattttgaagcatgccctgaatagattcagtcattatcaagtcaaactaaaaacggtgaaaggttgcgactattaccaaataggaaaaacctgaagacataagaactacacatgaggaatatgtcatttagcactttcactttttgatctccacagaagacaatgagaagtcataccataacaatgacgacaacttcagtcagcagctggccttactcctcccacagaatgcgctttawnnnnhatcatagcgaccaaccgccacaaaacttctcagcaacaccaaatgttactacctgtcccatggatgaaaaattgkhsactactgtgttaaccacatcctactctgttattttcatcgtgggactggttgggaacataatcgc

SEQ ID NO: 601 - DNA, 529 bp, Homo sapiens
  CDS 124..528
  Unsure 145..147: Xaa = Gln or Glu
  Unsure 310..312: Xaa = Glu or Gly
  Unsure 520..522: Xaa = His or Pro
ggctgcgcctagtgggccgttgccttacagttgctgagaggaggcgagaggcgggggcgctagggccgagatcatgtctgactgggagaggtttccttggcagcagaggacgctaggtttgggatgaaagaagctgggcagatgsaaaatctggagagcgcgagggccgggcggtcagtcagcacccagactggcagcatgaccggtcagataccaaggctttctaaagtcaaccttttcactctgctcagcctctggatggagctctttccagcagaagcccagcggcaaaaatctcagaaaaatgaagrgggaaagcatggacccttaggagataatgaagagaggaccagagtatctactgacaaaagacaggtaaagagaactggtcttgtggtggtgaaaaacatgaaaattgttggtctccactgttctagtgaagatttacatgccgggcagattgctcttattaaacatgggtcaaggctgaaaaactgtgatccttatttttccagaaaacmtgttctgc

SEQ ID NO: 602 - DNA, 208 bp, Homo sapiens
  CDS 24..206
  Unsure 153..155: Xaa = Gln, Glu, or *
ccttccctgcggccgcgcagagcatgccgggagccgccggccgccggtgtccggaccgctcgcccccgtttggacccgacttcggttcttctggggtgttgatgctcctaaagcccgagagcacgtgtccagaccctagcctgtacgacgcdbaactctgcccggtcccagaaccaaagccatgccggggtgtggcctctgaccccac

SEQ ID NO: 603 - DNA, 587 bp, Homo sapiens
  CDS 198..587
cttttacttcaggcgaacctgaactcagttaatgcaattttgaagcatgccctgaatagattcagtcattatcaagtcaaactaaaaacggtgaaaggttgcgactattaccaaataggaaaaacctgaagacataagaactacacatgaggaatatgtcatttagcactttcactttttgatctccacagaagacaatgagaagtcataccataacaatgacgacaacttcagtcagcagctggccttactcctcccacagaatgcgctttataaccaatcatagcgaccaaccgccacaaaacttctcagcaacaccaaatgttactacctgtcccatggatgaaaaattgctatctactgtgttaaccacatcctactctgttattttcatcgtgggactggttgggaacataatcgccctctatgtatttctgggtattcaccgtaaaagaaattccattcaaatttatctacttaacgtagccattgcagacctcctactcatcttctgcctccctttccgaataatgtatcatattaaccaaaacaagtggacactaggtgtgattytgtgcaaggttgtg

SEQ ID NO: 604 - DNA, 528 bp, Homo sapiens
  CDS 327..527
acaagaaaagaacatggtctagactgaagtaccaactaaatcatctcctttcaaattatcaccgacaccatcatggattcaagcaccgcacacagtccggtgtttctggtatttcctccagaaatcactgcttcagaatatgagtccacagaactttcagccacgaccttttcaactcaaagccccttgcaaaaattatttgctagaaaaatgaaaatcttaggggatatccattctggggctctgttttgttcattaattctggagccttcctaattgcagtgaaaagaaaaaccacagaaactctgataatattgagccgaataatgaattttcttagtgccctgggagcaatagctggaatcattctcctcacatttggtttcatcctagatcaaaactacatttgtggttattctcaccaaaatagtcagtgtaaggctgttactgtcctgttcttgggaattttgattacattgatgactttcagcattattgaattattcatttctctgctttctcaatttt

SEQ ID NO: 605 - DNA, 227 bp, Homo sapiens
  CDS 62..226
  Unsure 137..139: Xaa = Gln or His
atttccggttccggtgtcagttcgaggcgccgccgccgccgccgcagccgccggagccgcaatgcctaaaggaggaagaaagggaggccacaaaggccgggcgaggcagtatacaagccctgaggagatcgacgcgcastgcaggctgagaagcagaaggccagggaagaagaggagcaaaaaaggtggagatggggctgcaggtgaccccaaaaaaaaaaaaaaaa

SEQ ID NO: 606 - DNA, 228 bp, Homo sapiens
  CDS 63..227
  Unsure 138..140: Xaa = Gln or His
agaacatcctaatcrwaaaagttcgaggcgccgccgccgccgccgcagccgccggagccgcaatgcctaaaggaggaagaaagggaggccacaaaggccgggcgaggcagtatacaagccctgaggagatcgacgcgcastgcaggctgagaagcagaaggccagggaagaagaggagcaaaaaaggtggagatggggctgcaggtgaccccaaaaaaaaaaaaaaaa

SEQ ID NO: 607 - DNA, 378 bp, Homo sapiens
  CDS 119..376
  Unsure 143: n = a, g, c or t
  Unsure 318: n = a, g, c or t
  Unsure 332: n = a, g, c or t
  Unsure 122..124: Xaa = Leu or Phe
  Unsure 143..145: Xaa = Arg, Gly, or Trp
  Unsure 317..319: Xaa = Arg, Lys, Met, or Thr
  Unsure 332..334: Xaa = Arg, Gly, or Trp
  Unsure 371..373: Xaa = Ser or Tyr
gaaagacggagagaggaaaagggacaagggcaaggcaagagagaggcgtcgtcgtttgatctgctgccggagtgcgaagaggaagaggaagaggaagaggagcgccggagttgtaaagatgttsctggtggactggttctatngggtgctgtcatcgcttgggctgtggcagaaggaggctaagatcctcttccttggcctcgacaacgccggcaagaccaccctcctccacatgctgaaggacgagcggctcgtacagcaccagccaacgcagtaccccacgtcagaagagttgagcatcggcaggatcaagttcanggcgttcgaccttnggggccaccagatcgcccgccgcgtctggaaggactactmcgccaa

SEQ ID NO: 608 - DNA, 455 bp, Homo sapiens
  CDS 63..455
  Unsure 447..449: Xaa = Leu or Val
attsccacctgtgatgctcagagagaaaccatgagccctgaaaaacaccatattgttttgtgatgtcacctctggaatgttctgagtgttttggtgaccaacttctgcataggacctatacctggcaactcacattgcactcaaggccaaattatacaagaaaaagagataccagatctgaaagcctagaaattccaatcagtgtggttctacctcagaggggcacagccgaacccttcccgaggctccacaacttgtacagcacccctcgctgcgcgcagcaggccgccctgccccggctgagccgcaggatggcgagccagcactcctatccactgaaccgcttctcctccgtgcctttagaccccatggagcgccccatgtcccaggccgacctggagctggactacaacccgccgcgggtgcagctcagcgacgagatgttcktgttccar

SEQ ID NO: 609 - DNA, 366 bp, Homo sapiens
  CDS 68..364
  Unsure 143..145: Xaa = Asp or Glu
  Unsure 146..148: Xaa = Leu or Val
  Unsure 161..163: Xaa = Leu, Lys, Met, or *
  Unsure 275..277: Xaa = Gln or His
  Unsure 299..301: Xaa = Gln or His
gtacagaaagattggtggacaggagcagcggccggtgggmgagggcgctcggcggcggcctgcggccatggccaccgtgatggcagcgacggcggcggagcgggcggtgctggaggaggagttccgctggctgctgcacgacgakktgcacgctgtgttgwwgcagctgcaggacatcctcaaggaggcctctctgcgcttcactctgccgggctccggcactgaggggcccgccaagcaagagaacttcatcctaggcagctgtggcacagaccakgtgaagggtgtgctgactctgcakggggatgccctcagccaggcggatgtgaacctgaagatgccccggaacaaccagctgctgcactt

SEQ ID NO: 610 - DNA, 498 bp, Homo sapiens
  CDS 209..496
atgatgccagtgaatgcgtagtcccagcctcagcacaggggagccaccttgaagctctcaaatatcactgttgtgaatacagagagggaaaaccaactgtaacgtgccacccaaataaagctcattactagtcctgtccagcaacgtgcctctcctggccctagagttcttggaaatagcccaggccaaagagaaggcctttctccccatggtcagccacacgttccacatgcgcacagaggagtctgatgcctcacaggagggcgatgacctacccaagtcctcagcaaacaccagccatcccaagcaggatgacagccccaagtcctcagaagaaaccatccagcccaaggagggtgacatccccaaggccccagaagaaaccatccaatccaagaaggaggacctccccaagtcctcagaaaaagccatccagcccaaagagagtaacatccccaagtcctcagcaaaacccatccagcccaagctggcaatatt

SEQ ID NO: 611 - DNA, 504 bp, Homo sapiens
  CDS 214..504
  Unsure 493..495: Xaa = Leu or Met
aagacagacacggaagtgctgggaggcgccgggagcccgttcggttgcgggtgtctctggccctgcggtcagccctgggaacgtcccggagagctagattcctagaggcccgattccgctagcccggaacagacaaagccagcgctcccgcccgctccccgacttaggatccgatgccggcagcgtcctggggcccccgtagcgggctggaccatgagcctgctggacggcctcgcttcctcgccgcgggctccgctgcagtccagcaaggccaggatgaaaaagctcccgaagaagagccagaatgagaagtaccggctgaagtacctgcggctgcgcaaagcggccaaggccacggtgtttgaaaatgctgctatttgtgatgaaattgctcgtcttgaggaaaaatttcttaaagcaaaagaagaaagaaggtacttgctaaagaagctcctccagcttcaggctctaactgaaggggtaagtacaggcmtgcagctcctt

SEQ ID NO: 612 - DNA, 483 bp, Homo sapiens
  CDS 161..481
gtgggcggttcggcggctctgggcgctgttgtttggtctttaggcctgcggaggggcgttatctggagggccgcgggtgcaggccgcagtgacagggccgctcgccccgctagtcctgcctgtctcccggtgcagctgtgttcgcggcctgcaggccaacatggcgcaggaggtgtcggagtacctgagccagaacccgcgggtggcagcctgggtggaggcgctgcgctgcgacggcgagactgacaaacactggcgccaccgccgggattttttgcttcgcaacgccggggacctggcccccgctggcggcgctgcctccgctagcacggatgaagctgccgacgccgagagcgggacccgaaaccggcagctgcagcagctcatctccttttccatggcctgggcgaaccacgtcttcctcgggtgccgataccctcaaaaagttatggataaaatacttagtatggctgaaggcatcaa

SEQ ID NO: 613 - DNA, 473 bp, Homo sapiens
  CDS 277..471
  Unsure 334..336: Xaa = Arg or Pro
aaactgtccttgccaccacaattatttaatggacccaacagaaagtaaccccggaaattaggacacctcatcccaaaagacctttaaataggggaagtccacttgtgcacggctgctccttgctatagaagacctgggacagaggactgctgtctgccctctctggtcaccctgcctagctagaggatctgtgaccccagccatgaggaccctcgccatccttgctgcsattctcctggtggccctgcaggccagagccactccaggcaagagctgatgaggttgctgcagccccggagcagattgcagcggacatcccagaagtggttgtttcscttgcatggcgacgaaagcttggctccaaagcatccaggctcaaggaaaaacatggactgctattggcagaataccagcgtgcattgcaggagaacgtcgctatggaacctgcatctaccagggaagactctgggcat

SEQ ID NO: 614 - DNA, 522 bp, Homo sapiens
  CDS 279..521
  Unsure 300..302: Xaa = Arg or Lys
  Unsure 303..305: Xaa = Ala or Pro
  Unsure 306..308: Xaa = Trp or *
  Unsure 312..314: Xaa = Gly or Trp
  Unsure 324..326: Xaa = Arg or Ser
attctyaattgsgccmagcttccggcctggccacccgccagcaggtctcacccggttcgcatcagtcccgggcccccggcgcccctcagtagtagcaaattatcgcatccctgagcttaggatccccctttagtttcacatatgcccccacccccgtttccactttgatggcggcttccaaggagcatcccttagtaagaaccgtcgcaaatatcgtgatttggatccaccaaggcttggggcgagccgtcgaatgtgtgtggtaggggagcgggctgatgttagcacgtggtcttgttargscytgraatkggggraataggagscckgtgttcacgattagtttccaccacctaccaacttggaacctttacatctctccaagcctgagtttccttatctgtgagacagctgcgaataccggtttccagagagtagttaagaacccttgtgaacaccttcttcagcttccttcgacgcaaaacagactttttcattggaggagaagaagggatggcagag

SEQ ID NO: 615 - DNA, 322 bp, Homo sapiens
  CDS 171..320
  Unsure 309..311: Xaa = Phe or Ser
agtggttcggccgcggcgaccccactccggcggcgcgtcccccgagcttggtacggctcagcccgtctcccccgaagccgcgcgcccgcgcccgcgcccctcagtcggtggagcccgcagccccccttgtggcccgcggcagctccccgcccgctcggcccgcgcccgccatggtccgtccgcgccgtgccccgtaccgctccggcgccgggggccccctmgggggtcgcggccgycctccgcggcccctcgtggtgcgcgccgtccgctcgcgctcctggcctgccagcccyccgaggcccgcagcctycgcggatccggg

SEQ ID NO: 616 - DNA, 524 bp, Homo sapiens
  CDS 269..523
attttatactaatggagagagagagaaagacatagaagtctcactgacttgcacagtttacttcccactgactagatcttggataaggacttttttgtcttattcataaaaggcgattgtgttcaattatgttatgctcagaggtggaatatataatactgacttctattgcttaaaaaaggtgattatgaatggaggaagaagtctgtgggacaggaaatttaaaataaaattttagagttagatagattatgagaagaaaaaatcaatgccaagttttgttgaccgcatctttggtggtgaactaactagtatgatcatgtatgatcaatgcagaactgtctccttggttcatgaatctttccttgatttgtccctcccagttttagatgatcagagtggtaagaaaagtgtaaatgataaaaatctgaaaaagacagtggaggatgaagatcaagatagtgaggaagaaaaagataacgacagttacataaaagagagaagtgatattccttctggaacaa

SEQ ID NO: 617 - DNA, 274 bp, Homo sapiens
  CDS 75..272
  Unsure 249..251: Xaa = Asn or Lys
atacacttcttggctgtgtgcgctcagcaggacgtgggaggctccggcttcaagacactcatccaagaggaaggatggccagtatcttttctaagttgctaactggccgcaatgcttctctgctgtttgctaccatgggcaccagtgtcctgaccaccgggtacctgctgaaccggcagaaagtgtgtgccgaggtccgggagcagcctaggctatttcctccaagcgcagactacccagacctgcgcaasacaacaactgcatggccgagtgc

SEQ ID NO: 618 - DNA, 243 bp, Homo sapiens
  CDS 21..242
agggaagaggctgtcgggaaatggcggccgcggccgggctggggcttcagcgggaggcagcagaggggaagtggtcagcgtggcgaatgacggaagaaactcgcattgtctactggatcaaggacagacagctcaccaaccgtgacagcaccatactggaacttcaaaaagttctgaaaacatgttggttcgtttgttggagtatttttcaacttaaattccttttccttttttttttttttk

SEQ ID NO: 619 - DNA, 499 bp, Homo sapiens
  CDS 295..498
aggaagttgatcaatcccgaggctgctgagagacggtggcgcgattgggacagtcgccagggatggctgagcgtgaagatgcagcgggtgtccgggctgctctcctggacgctgagcagagtcctgtggctctccggcctctctgagccgggagctgcccggcagccccggatcatggaagagaaagcctagaggtttatgatttgattagaactatccgggacccagaaaagcccaatactttagaagaactggaagtggtctcggaaagttgtgtggaagttcaggagataaatgaagaagaatatctggttattatcaggttcacgccaacagtacctcattgctctttggcgactcttattgttggaaatctacatttctgaaggaacccactcaacagaagaagacatcaataagcagataaatgacaaagagcgagtggcagctgcaatggaaaaccccaacttacgggaaattgtggacagtgtgtccttga

SEQ ID NO: 620 - DNA, 771 bp, Homo sapiens
  CDS 613..771
caggttcagggcacagaacccaggcttgtaccatggtggtgggagaaaatgaccactggccaagaggactgctgacctgtgcaccaggctagtacttatgactacaaattcttactgcttctctaatcaactctgagggaagagggcatctgatcattacaaaagggagggcttataagtgatctcccaagaaggcagtgatctgctagtgcctttggctctgtacctctgctgggcatctctccaaggtctaaggtaacatattaaatgtttttgtcagctaatgcaggctcagtgactttaagtctgtaagttacccaggaagaaggattataggaaaaataactcagtaagtttaaaaccaaacacatttccatttagtgacaggaatttaagcaaggacctgaagtagaatcaactgattcacacagtagtaaatacaaagtagaacaatgatcttggcttcgctgtctggttcagtggtctgctggaatgcaatacacaagttaagtcacactgcagactgttttctagctgtggccgctggatgccacttctagcatagtagaactatgttaggaggaatgggaaaagtgagcaccacttctcaccatgttcccccctcctgctgccagtctctgctcccatgttggatgcagcagagatcacccaccagttggcccaggacagaccaataggaagggtccaatcactctaactacagccgaactcacctccacaacagtctctgtggctctagcctggactcct

SEQ ID NO: 621 - DNA, 658 bp, Homo sapiens
  CDS 440..658
gctttgtaattggtgcagctctgagaacacacgcatgcattccaggcggtgctgctggggctcggcggggccgtgtctggtctgcaaggcgcgcgggctcgtggggggttggctggggagcccacgctgcctggcgactcgggccaccgaatgtgagaccgagtccctttatgtcaccagcgcacacgctgatttgaaccctgcttcgacgtgtgtgtcatggcttaaaaatagctgctaatctgtcaacctgtcttgggcagaaacagcggcggcgacagagcaggagcgtcatggccgtggcgctgtctgcgcsggcgatccgcctttcggactgaggcccagcgcagcgcttgcaaagagcagcagctacctggcaactgaacccatcatcaccacagccactcctgcagctgccacggtttctgccacctctaagatgtgccctggtaactggctttgggcttctatgacttttatggcccgcttctcccggagtagctcaaggtctcctgttcgaactcgagggaccctggaggagatgccaaccgttcaacatcctttcctcaatgtcttcgagttggagcggctcctctacacaggcaagacagcctgtaaccatgccgacgaggtctggccaggcttctatctcggagac

SEQ ID NO: 622 - DNA, 460 bp, Homo sapiens
  CDS 32..460
  Unsure 356..358: Xaa = Arg or Lys
aatttttttgtgacttcttcagaccactttcatgacttctggaagcaaatgtcctagtacagactcaggaaaagaagaatatattgccacgttcaaaggatctgaatacttctgctacgacttgtctcaaaaccccattcaaagcagcagtgatgaaataactctgtcatttaaaacccttcagaggaatggactgatgcttcacactgggaaatcggctgattatgtcaatcttgccctgaaaaatggagctgtctctctggtcattaatttgggatcaggggcctttgaagcactagtggagcctgtgaatggaaagtttaatgataatgcctggcatgatgtgaaagtcaccargaatctgcgtcaggtgacaatatcagtggatgggattcttaccacaacgggctacacgcaagaagattataccatgctggggtctgatgactttttctatgtt

SEQ ID NO: 623 - DNA, 481 bp, Homo sapiens
  CDS 145..480
tttttcaccttcttctcctggacagccggggccaccattccactggcttcattcttgctgctcagctgaatacaaggcctcagtggtttgctgggctttggtgagatcttaaaggcaaacctctcttggcgcaaggaaggagccatgcagttgtatctgtactcgatgtccacagccatcatggggctagatgaacaggctagaaccctggaaagggaagagaagaaagaaaacagtggagcaatcagatcagacagatgtgtaaaggcatcattccagcagggactggcaaacaatatttccttttatctatgcccacctggctacagtccacgtatgctcagattctcttctgcctctgccgccctgagacagcaagaccaaccccttctcctcctcttcctcctcctcagcctactcaacgtgaagaggatgagaatgaagacctttatgatgacccgcatccacttaatgaatagta

SEQ ID NO: 624 - DNA, 456 bp, Homo sapiens
  CDS 295..456
aggcggtgctgcctgtgtcgtcgtccctgtttgttcttcttcaaacctcaggatttctccgtgtttcccagaccgtaacgttccaaaggtagaaacacagatgacagatttttggtcttttcgtcatttcctatatatgtgttcaatggtttggaatagttcaccagtgaagtcatctcaaccagcacagggccttgactcctaacaacaatcacacgaacttggaagaggatccttccccagctgaaacttcacttgagaccttctcattggccatcatcgacatctggattcatgatacagagaaacttgagtaatgatgacaatagcagtccagcctgcatggatgctgacatggatgctgtctcccattcttaccactggatgtcaagaaatgctagatgcgatccagccagtctgtactcgactctcagttccatcttctcaactcacagt

SEQ ID NO: 625 - DNA, 551 bp, Homo sapiens
  CDS 137..550
aaaaaaaaccagctgagtctttgtgccaggaagactgcgtgcagaaggtgactgtctcagtggagctgggtcatctcaggccttggctccttgaacttttggccgccatgtgcttcccgaagtcctctctgatgacatgaagaagctgaaggcccgaatgcaccaggccatagaaagattttatgataaaatgcaaaatgcagaatcaggacgtggacaggtgatgtcgagcctggcagagctggaggacgacttcaaagagggctacctggagacagtggcggcttattatgaggagcagcacccagagctcactcctctacttgaaaaagaaagagatggattacggtgccgaggcaacagatcccctgtcccggatgttgaggatcccgcaaccgaggagcctggggagagcttttgtgacaaggtcatgagatggttccaggccatgctgcagcggctgcagacctggtggcacggggttctggcctgggtgaaggagaaggtggtggccctggtccatgcagtgcaggccctctggaaacagttcc

SEQ ID NO: 626 - DNA, 494 bp, Homo sapiens
  CDS 283..492
gactttgcgaaggcatggcggggacactgtgaatgtcagcccagaaggtgatcagagcctgttaattaaaatggaaagaagacagaagggaaggtagacatcaggttctccctggagacttttcgttttcatttacgctgcggaaactgacgtttttgcctaacaccccatgtaatgtaaacgtataggcttgagtacgtgtccggccgcatgtgtagtgaaccctaaagctttcctaattgtagttagcatcgtccctaagcggaacgattttccgtgaacatgatttgtacttttctacgagccgtacagtatacggagaagctgcacaggtcctcggcaaagcgattgcttttgccatacatcgtgcttaacaaagcgtgcttgaagactgagcccagtttgagatgtgggcttcaatatcaaaagaaaacgctgcgacctagatgtattcttggagtcacccagaaaaccatctggacgcagggaccgag

SEQ ID NO: 627 - DNA, 585 bp, Homo sapiens
  CDS 128..583
attttccgggaagatggcggcgcacaagtcaggtccggcacatgtttccgcggagccccagcaatgacggatgatatcacctcttcttctctggtgagagtctgaggatagagacttttttctcaccatgaatgtcaccccagaggtcaagagtcgtgggatgaagtttgctgaggagcagctgctaaagcatggatggactcaaggcaaaggcctcggccggaaggagaatggtatcactcaggctctcagggtgacactgaagcaagacactcatggggtaggacatgaccctgccaaggagttcacaaaccactggtggaatgagctcttcaacaagactgcggccaacttggtagtggaaactgggcaggatggagtacagataaggagcctttctaaggagaccacccgttataatcatcccaagcccaacttgctgtatcagaagtttgtgaagatggctacattgacttcaggtggagagaagccaaacaaagacttggagagctgcagtgatgacgacaaccaggggtcaagtccccaaagattcttactgatgagatgctgctccaagcctgtgar

SEQ ID NO: 628 - DNA, 560 bp, Homo sapiens
  CDS 201..560
atcytawtcgaaaagctctttccttcttcctcttgttcctcctcctgcctctcttcgcttcgcctgcaaacgcggtgggggctgctcggcggtcaggagcagcaagagacagagcgacatgagagattggaccgcgggctgcactggagaatttactggtaggataattcatccctaaagagattgaagtgagcttcagaatggcaaaagaggagccccagagtatctcaagggacttgcaggaactgcagaagaagctgtctctgctgatagactccttccagaataactcaaaggtggtggcctttatgaagtctccagtgggtcagtacttggacagccatccgtttctggccttcaccttgctggtgttcattgtcatgtcggccgttcctgttggattcttcctgctcatcgtggtgcttaccaccctggctgctctgctgggggtcataatattggaaggattggtcatctctgtgggtggcttctcactgctctgcatcctctgtggkttgagcttcgtatcactcgccatgtcggggatgatgatagcatct

SEQ ID NO: 629 - DNA, 728 bp, Homo sapiens
  CDS 420..728
tttttggagggctcttagcaacggccctggttgagccccctcagccatgagaaaatcaaatcaatgtgccattcttccaggcgcgaggcagcagcggctgcagttcaacatgaaaggaggcttcctccctgcctgctaattacctgctcttcccgatctcatcgtttctgcctttgcaaagtgctactgagaagsgggaagaaacgtccgccacccatcccccttgctgcctgggggttcagacttgattagatggctaacaggggcccgagctatggcttaagccgagaggtgcaggagaagatcgagcagaagtatgatgcggacctggagaacaagctggtggactggatcatcctgcagtgcgccgaggacatagagcacccgccccccggcaggcccattttcagaaatggttaatggacgggacggtcctgtgcaagctgataaatagtttatacccaccaggacaagagcccatacccaagatctcagagtcaaagatggcttttaagcagatggagcaaatctcccagttcctaaaagctgcggagacctatggtgtcagaaccaccgacatctttcagacggtggatctatgggaagggaaggacatggcagctgtgcagaggaccctgatggctttaggcagcgttgcagtcaccaaggatgatggctgctatcggggagagccatcctggtttcacaggaaagcccagcagaatcgg

SEQ ID NO: 630 - DNA, 496 bp, Homo sapiens
  CDS 261..494
  Unsure 462..464: Xaa = Arg or Gly
  Unsure 486..488: Xaa = Asn or Lys
ttcgcggttagggattccatagttcacgggttacggcacacacgcgttacgtatatatcgaggttaatctgcgcaastcttcacttttgtctgaatgtattttagcggtgaattactccttctggctaagagcttcacatcttcagtgttaatggtggtggttttcgcatgtcttgcacacatttctagatcttgcactgtcgaaaagtcagctccgaaattgctgcaatgataagtttgctgaactgcatctctgcccaatgccacttcctcgcaaagacaacccacagtgtagtccactgctgcctcctttggcctctgttggtaagaaaatggctaagaaaatcgctgctgctcctccacctccacctcctcctccatcagaacggcgaggcaaacgcgcagaacagaaaggggctgtggggcagcggccagattggattttctctccgcagccccaarggatgtttctaatgacccaaggaaawttagtggt

SEQ ID NO: 631 - DNA, 500 bp, Homo sapiens
  CDS 91..498
wgaacatcctaatcgaaaaaagattctaagacaagacttctaatacggcatctcagtttattgttctttggggtttgttttcagatcctcatgtcagaaccaggcaaactcagccagaaaatcaaagtttggcttcaggagtactggaacatcacagatctcgtggccatttccacattcatgattggagcaattcttcgcctacagaaccagccctacatgggctatggccgggtgatctactgtgtggatatcatcttctggtacatccgtgtcctggacatctttggtgtcaacaagtatctggggccatacgtgatgatgattggaaagatgatgatcgacatgctgtactttgtggtcatcatgctggtcgtgctcatgagtttcggagtagcccgtcaagccattctgcatccagaggagaagccctcttggaaactggcccgaaacatcttctacatgccctactggatgatctatggagaggtgttgcagac

SEQ ID NO: 632 - DNA, 524 bp, Homo sapiens
  CDS 170..523
tttttccggtcttactcacgttgcggccttcctcgcgtcacagccgggatgaagccgatcctactgcagggccatgagcggtccattacgcagattaagtataaccgcgaaggagacctcctctttactgtggccaaggaccctatcgtcaatgtatggtactctgtgaatggtgagaggctgggcacctacatgggccataccggagctgtgtggtgtgtggacgctgactgggacaccaagcatgtcctcactggctcagctgacaacagctgtcgtctctgggactgtgaaacagtctggagaggtgttggtgaatgttaaggagcactcccggcagatcaacgacatccagttatccagggacatgaccatgtttgtgaccgcgtccaaggacaacacagccaagctttttgactccacaactcttgaacatcagaagactttccggacagaacgtcctgtcaactcagctgccctctcccccaactatgaccatgtggtcctgggcggtggtcaggaag

SEQ ID NO: 633 - DNA, 508 bp, Homo sapiens
  CDS 141..506
attggcttctctcccagtttccaccacactccccatctgggtaacctaagcaggttactcgcccctgtgaggaggttctcttctctgtacaatggaaatggttatccacacctatctctcagggaggctctgatatcatcatgagacccagctgtgctcctggatggttttaccacaagtccaattgctatggttacttcaggaagctgaggaactggtctgatgccgagctcgagtgtcagtcttacggaaacggagcccacctggcatctatcctgagtttaaaggaagccagcaccatagcagagtacataagtggctatcagagaagccagccgatatggattggcctgcacgacccacagaagaggcagcagtggcagtggattgatggggccatgtatctgtacagatcctggtctggcaagtccatgggtgggaacaagcactgtgctgagatgagctccaataacaactttttaacttggagcagcaacgaatgcaacaa

SEQ ID NO: 634 - DNA, 464 bp, Homo sapiens
  CDS 92..412
  sig_peptide 92..160: Von Heijne matrix score 12 seq RLLLLSLVSGALG/LG
  Unsure 325: n = a, g, c or t
tgctgccttctctgatggcttctccagcggcctcagtaccaccttagcggtcttctgccatgagctgccccactaactgggtgactttgccatgctgctccagtcagggctgtcctttcggcggctgctgctgctgagcctcgtgtctggagccctgggattggggggtgcagtcctgggggtggggctcagcctgggccctgtccccctcactccctgggtgtttggggtcactgctggggtcttcctctatgtggcccttgtggacatgctaccagccctgcttcgtcctccggagcccctgcctacgccccatgtgctcctncaggggctggggctgctgctggggggcggcctcatgcttgccataaccctgctggaggagcggctactgcccgtgaccactgagggctgatggggccaattggaaaggggtcgggttgcccttccttccccccaaccac

SEQ ID NO: 635 - DNA, 506 bp, Homo sapiens
  CDS 193..468
  sig_peptide 193..264: Von Heijne matrix score 11.6999998092651 seq FVLGLGLTPPTLA/QD
  Unsure 418..420: Xaa = Arg or Thr
acacacactcacacaaggacgcsaaccccacctagatgcaaagcaggattcaaaagaacatctttgcgttttctaccggctccccatcatcgtactagggaggaagaagcgggtgagaaacaaaacttctttccattgtcctgcccgtttctgcggacttgttctgaggccgaggagcctgtgttggaagagatggtgatgggcctgggcgttttgttgttggtcttcgtgctgggtctgggtctgaccccaccgaccctggctcaggataactccaggtacacacacttcctgacccagcactatgatgccaaaccacagggccgggatgacagatactgtgaaagcatcatgaggagacggggcctgacctcaccctgcaaagacatcaacacatttattcatggcaacaagcgcasatcaaggccatctgtgaaaacaagaatggaaaccctcacagagaaaacctaagaataagcaagtcttctttccaggtcaccacttgc

SEQ ID NO: 636 - DNA, 566 bp, Homo sapiens
  CDS 268..507
  sig_peptide 268..363: Von Heijne matrix score 8.89999961853027 seq LGLFFGFLLVIFA/IE
  Unsure 493..495: Xaa = Ala or Pro
actttagctcgcctaggatttgagctgggtgtatgtctgctcccagctcaagtccctccgagtgccagagaggaaggcagggagaagcggasacccctctttgggccaaggccaaggaggactgtgcttgccgggattgctgtccttgccattggactatggctccgattcgactctcagaccaagagcatcttcgagcaagaaactaataataataattccagcttctacacaggagtctatattctgatcggagccggcgccctcatgatgctggtgggcttcctgggctgctgcggggctgtgcaggagtcccagtgcatgctgggactgttcttcggcttcctcttggtgatattcgccattgaaatagctgcggccatctggggatattcccacaaggatgaggtgattaaggaagtccaggagttttacaaggacacctacaacaagctgaaaaccaaggatgagccccagcgggaaacgctgaaascatccactatgcgttgaactgctgtggtttggctgggggcgtggaacagtttatctcagacatctgcccaaga

SEQ ID NO: 637 - DNA, 568 bp, Homo sapiens
  CDS 30..527
  sig_peptide 30..74: Von Heijne matrix score 8.60000038146973 seq PLLIICLLPAIEG/KN
  Unsure 498..500: Xaa = Ser or Thr
actggggcacagtaggaggaacccagaagatgctgcctctcctgatcatctgtctcctgcctgccattgaagggaagaactgcctccgctgctggccagaactgtctgccttgatagactatgacctgcagatcctctgggtgaccccagggccacccacagaactttctcaaaatcgtgaccatttggaagaagaaacagccaaattcttcactcaagtacaccaagccattaaaacgttacgagatgataaaacagtacttctggaagagatctacacgcacaagaatctctttactgagaggctgaataagatatctgatgggctgaaggagaaggacatacagtccacactgaaggtcaccagctgtgctgactgcaggactcacttcctctcctgcaatgaccccactttctgcccagccaggaaccggcggacctccctgtgggctgtgagtctcagcagtgctctactcctggccatagctggagatgtbwcttttactggcaaaggaagaaggaggcagtaaagcaggaacagggcagcccgcatgtcttccagaagtga

SEQ ID NO: 638 - DNA, 420 bp, Homo sapiens
  CDS 56..217
  sig_peptide 56..133: Von Heijne matrix score 8.39999961853027 seq AAILLLTVPVAEG/VT
aaaactgaaaacagaacaaacacaaacacaaacagagaatcaacgaagaagaaaaatggtgaaggtgatgtgggtttccgttttagctctggcggcggcgattctccttttgacggtcccggtggcagaaggggtgacgtgctcgcctatgcagctggcttcatgtgcggcggcgatgacgtcatcttcgccgccatcggaggctgttgcacaaagctgagagagcagcagccatgcctttgtgggtacatgaggaaccctaccctccgccaatacgttagctcccctaacgcaaggaaagtctccaacagttgcaagattccttccccaagctgttaaggaaatgttaatcatgattaattagtgacaagtttcgctgattatagtggttaatgctggtcttatcttcgtcagtactac

SEQ ID NO: 639 - DNA, 526 bp, Homo sapiens
  CDS 276..440
  sig_peptide 276..353: Von Heijne matrix score 8.30000019073486 seq SVLLLAIVLISWG/CI
tatctcacgcgcggcagttcaagaacatcagacacgctcaacaaacacttgttgcttgactgatacattatggcgggcgggcaaggccccgatcacgtgataccgccccccaactccgggcggaagaggccagcgacagcttgcacgaagcgagtgggcgggcgctcgtgcccggctaaaagatggctgctggcgcctggcagccaccgcctgggaggttactgtaaggcccgcagctcccgccagctcccgcggactgctgccgcctccttaccatgaagccagtaagtcgtcgcacgctggactggatttattcagtgttgctgcttgccatcgttttaatctcctggggctgcatcatctatgcttcgatggtgtctgcaagacgacagctaaggaagaaatacccagacaaaatctttgggacgaatgaaaatttgtaactcttctggatttaattatctgaaaatacagttctttccctcatgcttatgtagatataaaaataaaattcataatgcaaagt

SEQ ID NO: 640 - DNA, 543 bp, Homo sapiens
  CDS 152..454
  sig_peptide 152..217: Von Heijne matrix score 7.90000009536743 seq ILLVALQARLSHS/RQ
aggaaattaggacacctcatcccaaaagacctttaaataggggaagtccacttgtgcacggctgctccttgctatagaagacctgggacagaggactgctgtctgccctctctggtcaccctgcctagctagaggatctgtgaccccagccatgaggaccctcgccatccttgctgccattctcctggtggccctgcaggccaggctgagccactccaggcaagagctgatgaggttgctgcagccccggagcagattgcagcggacatcccagaagtggttgtttcccttgcatgggacgaaagcttggctccaaagcatccaggctcaaggaaaaacatggcctgctattgcagaataccagcgtgcattgcaggagaacgtcgctatggaacctgcatctaccagggaagactctgggcattctgctgctgagcttgcagaaaaagaaaaatgagctcaaaatttgctttgagagctacagggaattgctattactcmtgtaccttctgctcaatttcctttcctcatctcaaataaatg

SEQ ID NO: 641 - DNA, 336 bp, Homo sapiens
  CDS 77..247
  sig_peptide 77..139: Von Heijne matrix score 7.80000019073486 seq SVLIFCLLNLAIS/DR
  Unsure 301: n = a, g, c or t
atctgagctagggaagaatgtgtattctgttgttggatgaagtagtctacagatgtcagttatatccagttgagtaatggtgttgttgagttcaacaatgtctgtactgattttctgcctgctaaatctggccatttctgatagaagggtaatgaagtctccaactataatagtgattcatctattttttcctcacagttctaccagtatttgcattgagaatttggtcactctgttattaggcacataagaatcctcagctgcattttgcattatttccagagttcttggttgtaatcantggatatacaggctgtggaagacttaccccatttc

SEQ ID NO: 642 - DNA, 507 bp, Homo sapiens
  CDS 110..496
  sig_peptide 110..187: Von Heijne matrix score 6.59999990463257 seq LFWLASGWTPAFA/YS
aagatgcggaggagggtgacgcactagctctccagttcgcccgttcctggcctgacccccaccaaggcccataccgcagtaggctcctcgggctgcccctcggttgacaatggtctccaggatggtctctaccatgctatctggcctactgttttggctggcatctggatggactccagcatttgcttacagcccccggacccctgaccgggtctcagaagcagatatccagaggctgcttcatggtgttatggagcaattgggcattgccaggccccgagtggaatatccagctcaccaggccatgaatcttgtgggcccccagagcattgaaggtggagctcatgaaggacttcagcatttgggtccttttggcaacatccccaacatcgtggcagagttgactggagacaacattcctaaggactttagtgaggatcaggggtaccagaccctccaaatccctgtcctgttggaaaaacagatgatggatgtctagaaaacacc

SEQ ID NO: 643 - DNA, 466 bp, Homo sapiens
  CDS 14..310
  sig_peptide 14..136: Von Heijne matrix score 5.40000009536743 seq WLCPGLRLPGSLA/GR
  Unsure 29..31: Xaa = Ala, Cys, Gly, Ser, or Trp
gtaaacagacaacatggcggccgcggtgkssgcggcacctggggccttgggatccctgcatgctggcggcgcccgcctggtggccgcttgcagtgcgtggctctgcccggggttgaggctgcccggctcgttggcaggccggcgagccggcccggcgatctgggcccagggctgggtacctgcggccgggggtcccgccccgaaaaggggctacagctctgagatgaagacggaggacgagctgcgggtgcggcacctggaggaggagaaccgagacagagacaagaacatggtcaaaggcatggagatgtgaacatgtgtggtgtatttgggacgtaacataaggaattgtggtgcttggaataaacagagcttatggcaaaaattcactcagtaaaaatcttataaaaatgctatcaaaagctgtggatgctttgaaatctgataagaaagtacggaccataat

SEQ ID NO: 644 - DNA, 502 bp, Homo sapiens
  CDS 19..342
  sig_peptide 19..75: Von Heijne matrix score 4.19999980926514 seq AVAASAASGQAEG/KK
gcgcgctgctcttctaagatggctgccgctaccggtgcggtggcagcctcggccgcctcgggtcaggcggaaggtaaaaagatcaccgatctgcgggtcatcgatctgaagtccgagctgaagcggcggaacttagacatcaccggagtcaagaccgtgctcatctcccgactcaagcaggctattgaagaggaaggaggcgatccagataatattgaattaactgtttcaactgatactccaaacaagaaaccaactaaaggcaaaggtaaaaaacatgaagcagatgagttgagtggagatgcttctgtggaagatgatgcttttatcaaggtaaagtgttaattactcaggttaagatgcttattttaagcctagtattttgcatcatgaattttgtgctttttgttgaacaatggtcactgaagtatgtaggttaaagakdaagacctatgtaatattgacaacgtttaatattgtcaatctcattaactctcataat

SEQ ID NO: 645 - DNA, 493 bp, Homo sapiens
  CDS 264..443
  sig_peptide 264..386: Von Heijne matrix score 4.19999980926514 seq VFWMSFYLSRVNC/TT
ttcgtgaaatttgttggttttgaggactgtaaaagtgatttcatactctgaatataaaactggataatagggtaatgttttaaaatttattatgctattattcagaatgccaaagtattattttttttcccaaaatcagtctggacatttactactttttagactttttgacgttgaactttctgtataaaaattggctgggttttgagcttttggtaagaaataaaagccgattaagcactggccgccccgcgtggtacccaatgcccgagtcactgtggcagcattcgcactggtgtggggagtcctttcaactcaaggaggctgggtttctgggcacccttgaagttttctggatgtctttttatctttctcgtgtgaactgcactacaaaagagaccagcccacttcccaagccagccagacacctgggtcttgagccataaactggcgtagttaagctttgcagcttccagtgtattttatttattct

SEQ ID NO: 646 - DNA, 540 bp, Homo sapiens
  CDS 175..354
  sig_peptide 175..309: Von Heijne matrix score 4 seq ENFLSLLSKSCSA/DP
attttaaaatggaaattggggcgaggggttggcggctgggcgaagggagcattcaaaagcggagaatgtcactttacccgagaaattcactacgatgggccattggtttctgctcggctcgcaggcgcactgcacgagtggaggtgtggctagtggctgtgatgagataaatccatgcatagccttttcattgcgagcttgaaagttcttttttattacagttttagctttaggtttaattggttcgactgccttctccacaatttgggcgagaatttccttagccttctcagcaaaagttgttctgcggacccgtctgggtcaactttcatgagggacattgagacaaacaaatgaaatatgggttaaagtactctgagcagctacaaaaagaagaccagtctatcctgctggagacagtggccacgtgaagaaagagctcttgcagtatgaagaccacatggaaagagaggccacatggaaccaacagtcagcatcttggtttcggacacgtgaagaattcatctcagactgtgtatc

SEQ ID NO: 647 - DNA, 505 bp, Homo sapiens
  CDS 100..498
  sig_peptide 100..138: Von Heijne matrix score 3.79999995231628 seq MAHCVTLVQLSIS/CD
attttgtgaagcggcgaaggaggtggtggctgcgttgggctccgggaagccgttcgggctggggctgtcggccgcggggcggaggcactcgcgcgggggatggcccactgcgtgaccttggttcagctgtccatttcctgtgaccatctcattgacaaggacatcggctccaagtctgacccactctgcgtccttttacaggatgtgggagggggcagctgggctgagcttggccggactgaacgggtgcggaactgctcaagccctgagttctccaagactctacagcttgagtaccgctttgagacagtccagaagctacgctttggaatctatgacatagacaacaagacgccagagctgagggatgatgacttcctagggggtgctgagtgttccctaggacagattgtgtccagccaggtactgactctccccttgatgctgaagcctggaaaacctgctgggcgggggacatcacggtctcagctcaggaattaaagga

SEQ ID NO: 648 - DNA, 472 bp, Homo sapiens
  CDS 78..281
  sig_peptide 78..218: Von Heijne matrix score 3.70000004768372 seq PLLSLHSRGGSSS/ES
attttgcgaacggcgagcagcggcgcggcgcggagagacsagcggaggttttcctggtttcggaccccagcggccggatggtgaaatcctccctgcagcggatcctcaatagccactgcttcgccagagagaaggaaggggataaacccagcgccaccatccacgccagccgcaccatgccgctcctaagcctgcacagccgcggcggcagcagcagtgagagttccagggtctccctccactgctgtagtaacccgggtccggggcctcggtggtgctcctgatgcccctcacccacccctgaagatcccaggtgggcgagggaatagtcagagggatcacaatctttcagctttttgggctttgagattgtgagaccggggcatccccttatccccaagagacccgacgcttgcttcatggcctacacgttcgagagagagtcttcgggagaggaggaggagtagggccg

SEQ ID NO: 649 - DNA, 458 bp, Homo sapiens
  CDS 173..373
  sig_peptide 173..265: Von Heijne matrix score 3.70000004768372 seq ASWALGRWGSCRA/LD
agaatctgacattccaggactccactaggcctgttttcctctgtgggaactagagccaaggcgagagacccgtgccagccccgaggctcccggggcccatgggcaggcggggctggtacagggccccggggctctctcagcccatctgtcacccctcccccccaacacccagatgtcccgtcttggcagtgctgtcccggactgccacattaatgctccagaacccgccagctgggccctggggcggtggggctcctgcagagccctggacaaaggcgagggagggagggaaggggatcctaagcacccctccctccctggccctaggaggcagacatgcccgatgagatcaacattgatgaattgttggagttagagagtgaagaggagagaagccggaaaatccagggactcctgaagtcatgtgggaaacctgtcgaggacttcatccagggagc

SEQ ID NO: 650 - DNA, 482 bp, Homo sapiens
  CDS 8..250
  sig_peptide 8..64: Von Heijne matrix score 3.5 seq RLLRASVARHVSA/IP
actgaagatggcggctgctgtaggacggttgctccgagcgtcggttgcccgacatgtgagtgccattccttggggcatttctgccactgcagccctcaggcctgctgcatgtggaagaacgagcttgacaaatttattgtgttctggttccagtcaagcaaaaattatttcttctatcctttggatttcacctttgtgtgtcctacagaaattgttgcttttagtgacaaagctaacgaatttcacgatgtgaactgtgaagttgtcgcagtctcagtggattcccactttagccatcttgcctggataaatacaccaagaaagaatggtggtttgggccacatgaacatcgcactcttgtcagacttaactaagcagatttcccgagactacggtgtgctgttagaaggttctggtcttgcactaagaggtctcttcataattgaccctaatggagtcatcaagcatttgagcgtcaacga

SEQ ID NO: 651 - DNA, 291 bp, Homo sapiens
  CDS 130..288
  sig_peptide 130..234: Von Heijne matrix score 3.5 seq GLVEVVAVGVVRS/DQ
agtctctgtcggagtctgtttcccagtgcacccaacttgtgatagaaggtatatgttctgctgaaaaagagaaaaaggaaaaaaaagaataaaagcagagagcagagaaggacagggtctggctgccgcatggaggggaggagcaggagcaggaaagcctgtctggaggttgctacagtaaaccaggtcttcgtggggttggtcgaggtggtggcagtgggggtggtgagaagtgatcagattaagaatatgtatttaaaatacagccagcatgatctgctgatggactag

SEQ ID NO: 652 - DNA, 766 bp, Homo sapiens
  CDS 166..333
aaaaggagtagctattagccaattcggcagggcccgctttttagaagcttgatttcytttgaagatgaaagactagcggaagctctgcctctttccccagtggcgagggaactcggggcgattggctgggaactgtatccacccaaatgtcaccgatttcttcctatgcaggaaatgagcagacccatcaataagaaatttctcagcctggccgaaaatggttggccccacgaagccacgacaactggaggcaaagagggttgctcaacgccccgcctcattggaaaaccaaatcagatctgggacctatatagcgtggcggaggcggggcgatgattgtcgcgctcgcacccactgcagctgcgcacagtcgcatttctttccccgcccctgagaccctgcagcaccatctgtcatggcggctgggctgtttggtttgagcgctcgccgtcttttggcggcagcggcgacgcgagggctcccggccgcccgcgtccgctgggaatctagcttctccaggactgtggtcgccccgtccgctgtggcggaaagcggcccccagaaccgaccacaccgtgcaagaggacccagaacccgaggacgaaaacttgtatgagaagaacccagactcccatggttatgacaaggaccccgttttggacgtctggaacatgcgacttgtcttcttctttggcgtctccatcatcctggtccttggcagcacctttgtggcctatctgcctgactacaggatgaaagagtgggt

SEQ ID NO: 653 - DNA, 488 bp, Homo sapiens
  CDS 199..357
cagtaggatacatagcttttcttccagtgaaacaaagttcatatcatccattgtttttcaagcacgtgacaccagcctcaaagtaaatgacatgaccagtggttgaacagtctaattttcaaatttaatatagagcatataacttctgatttgatagtatttattttaaaaaattatgttttcatcattcatttgaaaatgaaaaagccccaaagtgagaactttgggggagggcctagaacatggatagatctcttagtggtctttccaaaagtacatgtacttgaaatattttcattatcatactattctttgaaaaaaaagatgcttactgtatacttgttttcaagcatcctctaaaatcaaaggttttgatcacaatatgcagatttctcttgatagatacttaaataggctatttctctcctcttcttgggcaatgccttgttttctcctctgaatatttgcatttgaaaggattgcttcct

SEQ ID NO: 654 - DNA, 489 bp, Homo sapiens
  CDS 253..426
aacctcacgaggccttacgtgcctagagcggttcctctccgtggcgccctaccgccttcggcgcgaaggtggctggtgcgtaccgtcccgaaccctaggagccgagatcccacccgcaggaccccaaaacccaatgatcctgcagcagcccttgcagcgaggcccccagggaggggccagcgcctcccgcgggccgccttgggggtgacttggggcctggacgccagctccsctctscgaggagctgtgcccatgagcaccaagcggcgcctggaggaggagcaggagcctctgcgcaagcagtttctgtctgaggagaacatggccacccacttctctcaactcagcctgcacaatgaccaacccctactgcagccccaccatgaccttctccccagccctgcccccactcaggagcccttgctctgagctgcttctctggcgctatcctggcagcctcatcctgaggcctccgtctgctgaggctgg

SEQ ID NO: 655 - DNA, 616 bp, Homo sapiens
  CDS 205..387
acttccgggggagcggcgcggcggcggggaggatctctcaccccatcactcagggtggcgcaatcacgactcattggctcactgcagcctagacctcccagctggagcaattctcctgcctcagccttctgagtagctgggactacagttggttctaaagagtggtgagtcagaagagacgtcaggcagcaagcgacttgggccatggcctctgacctagacttctcacctccggagtgcccgagcccactttcctggagaacctgctacggtacggactcttcctgggagccatcttccagctcatctgtgtgctggccatcatcgtacccattcccaagtcccacgaggcggaggctgaaccgtctgagcccagaagtgctgaggtgacgaggaagcccaaggctgctgttccttctgtgaacaagaggcccaagaaagagactaagaagaagcggtagaagaggaggcctgaggactgggcgkgcagggagagggtcttkggggacagcctcctgggaatctacattgtgtttcccccgcattyccaggctcaggttctgargargctgtgacgccctatgaccgcagagatctagacagtcgtaacagtccc

SEQ ID NO: 656 - DNA, 508 bp, Homo sapiens
  CDS 37..219
ctttcccctgccggtgtcctgctcgccgtccccgccatgctgtctctagactttttggacgatgtgcggcggatgaacaagcggcagctctattatcaagtcctaaattttggaatgattgtctcatcggcactaatgatctggaaggggttaatggtaataactggaagtgaaagtccgattgtagtggtctcaggcaaaatgggcatatcaagtttttgaccaaaggagataataatgcggttgatgaccgaggcctctataaacaaggacaacattggctagagaaaaaagatgttgtggggagagccaggggatttgttccttatattggaattgtgacgatcctcatgaatgactatcctaaatttaagtatgcagttctctttttgctgggtttattcgtgctggttcatcgtgagtaagaagcctgccttgctgttcctgggaagatgccatagttttcgttactggatgtttggagtagatactggtctgtgattggtgg

SEQ ID NO: 657 - DNA, 500 bp, Homo sapiens
  CDS 114..452
ttttcccctgccggtgtcctgctcgccgtccccgccatgctgtctctagactttttggacgatgtgcggcggatgaacaagcggcastctattatcaagtcctaaattttggaatgattgtctcatcggcactaatgatctggaaggggttaatggtaataactggaagtgaaagtccgattgtagtggtgctcagtggcagcatggaacctgcatttcatagaggagatcttctctttctaacaaatcgagttgaagatcccatacgagtgggagaaattgttgtttttaggatagaaggaagagagattcctatagttcaccgagtcttgaagattcatgaaaaatttgttccttatattggaattgtgacgatcctcatgaatgactatcctaaatttaagtatgcagttctctttttgctgggtttattcgtgctggttcatcgtgagtaagaagcctgccttgctgttcctggggaagatgccatagttttcgtt

SEQ ID NO: 658 - DNA, 411 bp, Homo sapiens
  CDS 90..305
  Unsure 138: n = a, g, c or t
  Unsure 315: n = a, g, c or t
  Unsure 326: n = a, g, c or t
  Unsure 343: n = a, g, c or t
  Unsure 360: n = a, g, c or t
  Unsure 377: n = a, g, c or t
  Unsure 138..140: Xaa = Arg, Cys, Gly, or Ser
  Unsure 270..272: Xaa = Gln or His
ttgggcagaaaaattcaagcaggagattgtatttcttttggagttgtacgatttcctttattatttgaactgcagtaaagaaagctgggatgggctcctctagggatacttccagatccctgggcggttgtagccctngctcctctttaaatggatttggtttcaaagacgatcatctccgtcttctcggatgtcatagtgccactgatcatctccagctcctkgccaccctgggctttctccacttttgcctctatgttttgcttctccamcgtcttagccacgatatctacctctctgtcatgtgatgtgacncttgttttttnaaccaagagttgccctnaagstcccttaaaaaanagctgatcttactggsnttcttttgtaaarctcctgtgatagatgcagatt

SEQ ID NO: 659 - DNA, 529 bp, Homo sapiens
  CDS 235..444
atttccagcggttgctggttctgacgggttgtagtctgccaggacaatgagttatgactaccatcagaactggggccgtgatgggggtccccgcagctccggtgggggctatggaggggggccagcagggggtcatggaggtaaccgaggctccggaggagrcggcggcggcggagggggtggtcgaggcggcaggggccggcatcccgggcacctgaaagccgcgaaatcggcatgtggtacgcgaaaaaacaggggcagaagaacaaggaagcggagaggcaagagagagctgtagtacacatggatgaacgacgagaagaacaaattgtacagttactgaattctgttcaagcgaagaatgataaagagtcagaagcacagatatccaccccagacttggctgtccgctctgcgccttcgggccagccctttcgggcttgctgagcctggaggccgakgagaatgcacttccgggttttgctgaggctctgaggagctaccaggaggctgcggctgcaggcacctt

SEQ ID NO: 660 - DNA, 478 bp, Homo sapiens
  CDS 128..286
gttctttggccctgtgacacgtagcaacggggctggttcagggtctgaaacagagtttgggggttgtttgggattagtgaagctactgcctttgccgccagcgcagctcagagtttgattatttgcaatgtcaggctttgaaaacttaaacacggatttctaccagacaagttacagcatcgatgatcagtcacagcagtcctatgattatggaggaagtggaggaccctataacagtatgctggctatgactattcgcagcaaggcagatttgtccctccagacatgatgcagccacaacagccatacaccgggcagatttaccagccaactcaggcatatactccagcttcacctcagcctttctatggaaacaactttgaggatgagccacctttattagaagagttaggtatcaattttgaccacatctggcaaaaaacactaacagtattacatccgttaaaagtagcagatg

SEQ ID NO: 661 - DNA, 456 bp, Homo sapiens
  CDS 110..277
tacggttttattattatatcgatttatttgtgaggagggaatctgttcatgtagattttaaaagtgcaagagtgtccagcgtcatctgcctctcctgtcccctgaccacatgattttctgttcccataaactagcactgttgagtatatttccagagcatactccaggcgtgtgtaaatacagccttccactcctgcacacacaccgtgtttttacatcagtaacattctgcgcatattgttcagcaccatgccttttccacttaacagtaataatttaaaggtcattccatttcagtacataaagagcgtcctcaggccgggcgcggtggctcgcacctgtaatcctagcactttgggaggctgaggcaggtggatcacctgaggttggaagttgaagaccagcctggccaaaagggcgaaaccctgtctctactgaaaatagaaaaattagctc

SEQ ID NO: 662 - DNA, 506 bp, Homo sapiens
  CDS 71..379
acagctgcccgggactccagtgatcgccgcggctcgctcgcgccccggaaactgccccttctcgggggtcatgatgggcagcaagatggcgtctgctagtagggtcgttcaggtagtcaaaccacacactccattaataaggtttcctgacagaagagacaatcctaaacccaatgtatcagaagctttgagatcagcagggctaccatctcactcttctgtaatttcacaacattctaaaggaagtaaatcaccagatttgctgatgtatcagggtccaccagacactgcagaaataataaaaacattacctcagaaatacagaaggaaacttgtgtctcaagaagaaatggaatttatccaacgtggaggtcctgaataaccatggtggctgctgtttgtcatcagacaatagaattgtctttacaataaaggacttccaaaatgacagatgagaaactgtatattaaacacctttaataaatattatgaaaaaaamhaawaaa

SEQ ID NO: 663 - DNA, 595 bp, Homo sapiens
  CDS 207..578
  Unsure 19: n = a, g, c or t
atctcgcgtccccaacggncccccgggtcggtttccgcggtggccatgactgcggccgtgttcttcggctgcgcttcattgccttcgggcctgcgctcgccctttatgtcttcaccatcgccaycgagccgttgcgtatcatcttcctcatcgccggagctttcttctggttggtgtctctactgatttcgtcccttgtttggttcatggcaagagtcattattgacaacaaagatggaccaacacagaaatatctgctgatctttggagcgtttgtctctgtctatatccaagaaatgttccgatttgcatattataaactcttaaaaaaagccagtgaaggtttgaagagtataaacccaggtgagacagcaccctctatgcgactgctggcctatgtttctggcttgggctttggaatcatgagtggagtattttcctttgtgaataccctatctgactccttggggccaggcacagtgggcattcatggagattctcctcaattcttccttttattcagctttcatgacgctggtcattatcttgctgcatgtattctggggcattgtattttttgatggctgtgagaaga

SEQ ID NO: 664 - DNA, 487 bp, Homo sapiens
  CDS 41..226
gatacggttcctccaccgaggcccatgcgaagtttccactatggcttccagcactgtcccggtgagcgctgctggctcggctaatgaaactcccgaaataccggacaacgtgggagattggcttcggggcgtctaccctttgccactgataggaatgacttccggagaacttgatactaaatttgggactctttgctgcgggagtttggctggccaggaacttgagtgacattgacctcatggcacctcagccaggggtgtagccaagtagacaaatggaatcctgtgctgaacccgaatcttccaaaaaacagcctacaatctgtgaccaccacaagatgtgccctgatggcagctgaagtttgattcagatgggcacttttcttccccttccctgcctagtttccttttgttccttgagtccacgcagaattccattctctggtcagcagacaggcttaagctaaagtattgcatctattctgta

SEQ ID NO: 665 - DNA, 415 bp, Homo sapiens
  CDS 54..248
acttctgacctgcggcccgtagtccgagccggggacggcggcgtcggtgggtcatgctccggcactccccctcgctgtgggagctggtggaggagcacgttccgctccgggagcgacgcgaagtgaagaggattctggggggaggcggcggtggacctgagcctggagctgcgggcggaggtggcgatgttacgggcactgctccaagaggctcgatcctctcaagcccccagctcccgccccatctctgacccctcttctcttctggcaccaccgcctctcctaaaggacctcttgcgccaggagctccggcagttgctccagggtctccgccacaaagccatctgtgagggcagggaccaggsccaagcttgggtccagtatagcccccarggtcctgcactttgccttggag

SEQ ID NO: 666 - DNA, 487 bp, Homo sapiens
  CDS 13..432
agtgaggaaatcatgggtcagaatcgagagatgcttccgttttggatgaacagcaccggcaggcgggaaggttggcagcgtggatggcacggctacgacaacgagctcatggacatgcggggcatcttcctggccttcggacctgatttcaaatccaacttcagagctgctcctatcaggtcggtggacgtctacaatgtcatgtgcaatgtggtgggcatcaccccgctgcccaacaacggatcctggtccagggtgatgtgcatgctgaagggccgcgcggcactgccccgcctgtctggcccagccactgtgccctggcatgattcttctcttcctgcttgcataactgatcatattgcttgtctcagaaaaaaacaccatcagcaaagtgggcctccaaagccagatgattttcattttatgtgtgaataatagcttcattaacacaatcaagaccatgcacattgtaaatacattattcttg

SEQ ID NO: 667 - DNA, 476 bp, Homo sapiens
  CDS 33..218
gaacaagcgtccctgatccagaaggtgttcagatggagatggcgagttctgctggctcctggctctctggctgcctcatccctctcgtcttcctccggctgtctgtgcatgtgtcaggccacgcaggggatgccggcaagttccacgtggccctactagggggcacagccgagctgctctgccctctctccctctggcccgggacgtacccaaggaggtgaggtggctgcggtccccattcccgcagcgctcccaggctgttcacatattccgggatgggaaggaccaggatgaagatctgatgccggaatataaggggaggacggtgctagtgagagatgcccaagagggaagtgtcactctgcagatccttgacgtgcgccttgaggaccaagggtcttaccgatgtctgatccaagttggaaatctgagtaaagaggacaccgtgatcctgcaggttgcagccccatctgtgg

SEQ ID NO: 668 - DNA, 475 bp, Homo sapiens
  CDS 90..431
gtattatgatgtcgtataatgtaacattctgaaaatacaacatgtccacctaaatttcaaagggctgaaaaaaatttcttgaaagatgaatggacattgtggcccattgtgagaaagccatggcagagtcagttaagaaacatcagtttagcacttctgaatcttatcttccagcaactttaatactgaacagcatatcctttaatactgatggctccatacagtataaagaaaagctgtatttctctgcctccgaagccctagacgcttacattgatgattttcacttaaactatgagcctcctgatattgatacaaaggttaacctggatcagagtcctcttgaatttcttgctaagtcaaatagtggggtccatggaatcgcaccaggccaaagtggcatggagaagatcatacagtggtatgctgcataacaaggtttctgtcagcaacaaattgcttatatgatggtggc

SEQ ID NO: 669 - DNA, 578 bp, Homo sapiens
  CDS 411..575
  Unsure 489..491: Xaa = Asn or Thr
  Unsure 510..512: Xaa = Asn or Lys
  Unsure 519..521: Xaa = Asn or Lys
  Unsure 525..527: Xaa = Leu or Val
gagcaagccctggtggcagcgcagggtccagtgcagcccctccccacagcatgctgggggctaattctgatgtcatctttctgcagaaaaccattagaccatccctccagactgccaccctcaaagccgtctgcccaggccccatctgacactcttgacatctgcaggtcccagaccctatgatgtgtccactctggaggctcctcatcttcctcgggttgctggccttgcccttggcaccacacaagcagccttggcctggcctggcccaagcccacagagacaacaaatccaccctggcaagaagtccttcgataacaacatcgtaaagatgtgtgcacatatgagcatcgttgtggagttctggctggagaaagacgagtttggccggaggatctggtgataggcaaatgcgatgcagacccagcagtgtccatgtggccatcctcactgargctatcccaccaaagatgatcagtttctctacaamctcaaagagaatcttcaaaaaktctccaaamatgktaaaaagtcaggtatgtcctctgatcggtgaaatctcgggcagctggatgtga

SEQ ID NO: 670 - DNA, 467 bp, Homo sapiens
  CDS 62..430
  Unsure 137..139: Xaa = Gln or His
atttccggttccggtgtcagttcgaggcgccgccgccgccgccgcagccgccggagccgcaatgcctaaaggaggaagaaagggaggccacaaaggccgggcgaggcagtatacaagccctgaggagatcgacgcgcastgcaggctgagaagcagaaggccagggaagaagaggagcaaaaaaggtggagatggggctgcaggtgaccccaaaaaggagaagaaatctctagactcagatgagagtgaggatgaagaagatgactaccagcaaaagcgcaaaggcgttgaagggctcatcgacatcgagaaccccaaccgggtggcacagacaaccaaaaaggtcacacaactggatctggacgggccaaggagctttcgaggagagaacgagaagagattgagaagcagaaggcaaaagagcgttacatgaaaatgcacttggccgggaagacagagcaagccaa

SEQ ID NO: 671 - DNA, 468 bp, Homo sapiens
  CDS 63..431
  Unsure 138..140: Xaa = Gln or His
agaacatcctaatcrwaaaagttcgaggcgccgccgccgccgccgcagccgccggagccgcaatgcctaaaggaggaagaaagggaggccacaaaggccgggcgaggcagtatacaagccctgaggagatcgacgcgcastgcaggctgagaagcagaaggccagggaagaagaggagcaaaaaaggtggagatggggctgcaggtgaccccaaaaaggagaagaaatctctagactcagatgagagtgaggatgaagaagatgactaccagcaaaagcgcaaaggcgttgaagggctcatcgacatcgagaaccccaaccgggtggcacagacaaccaaaaaggtcacacaactggatctggacgggccaaggagctttcgaggagagaacgagaagagattgagaagcagaaggcaaaagagcgttacatgaaaatgcacttggccgggaagacagagcaagccaa

SEQ ID NO: 672 - DNA, 527 bp, Homo sapiens
  CDS 85..327
  Unsure 316..318: Xaa = Ser or Thr
cttttctatgtcaattttctggcaacaaagtctgtggccaagaaagaagctaccgactccttcgaccacaaaaagttcttccaaatggtcggcctgaagaaaaagagtgcggatgatgtgaagaaggtgtttcacatgctggacaaggacaaaagtggcttcatcgaggaggatgagctgggattcatcctaaaaggcttctccccagatgccagagacctgtctgctaaagaaaccaagatgctgatggctgctggagacaaagatggggacggcaaaattggggttgacgaattctccactctggtggctgaaastaagaagcactgactgcccctggtcttccacctctctgccctgaacacccaatctcggcccctcttgccaccctcctgcatttctgttcagttcgtttatgttattttttactcccccatcccctgtggccctctaatgacaccattcttctggaaaatgctggagaagcaataaaggttgtaccagtcaaaaaaaaaaaaaaatgcgaa

SEQ ID NO: 673 - DNA, 594 bp, Homo sapiens
  CDS 161..589
aaaaggatatacaaagaatgattttgccattcatacactaaaaaataactttgaagcagatgcttattttgttaaagttattgttcttagtggtctgtgttctaatgactgtcctcgtaagataacaccctttggagtgaatcaacctggaccttatatcatgtatacaactgtagatgcaaatgggtatctgaaaaatggatcagctggccaactcagccaatcctcacatttagctctccaactaccatacaacgtgcttggtttaggtcggagcgcaaattttcttgaccatctctacgttggtattccccgtccatctggagaaaaatctatacgaaaacaagagtggactgcaatcattccaaattcccagctaattgtcattccataccctcacaatgtccctcgaagttggagtgccaaactgtatcttacaccaagtaatattgttctgcttactgctatagctctcatcggtgtctgtgttttcatcttggcaataattggcattttacattggcaggaaaagaaagcagatgatagagaaaaacgacaagaagcccaccggtttcattttgatgctatgtgact

SEQ ID NO: 674 - DNA, 545 bp, Homo sapiens
  CDS 297..500
atgaggttccatgcggccaacaagagagggagatagaaaggaaagggccccagatgtggctccccttccaaatactttaagttcccagtttaacctatgtgatcctttcaatatttccaccataatgcatgggtccagtcctgttctttgggttgcacaaaataattagcacaagcatacaaaaaggcaagagtaatattcaaaatactgaagagctatggtacactaaagtgccctgggggtaagtctgtgtgtgccagcctgcagcaggtggtctcagccctggaaggaacagcatgatggacaccatggatcccttctggtttaatgcattcaaaaggactaataccatactgcaccatttgagaatgtccaagcacacagatgcagcagaagaggtgctattggaaaaaaaaggttgcacgggagtcataacactaaacagaccaaagttcctcaatgcactgactcttaatatgattcggcagatttatcacagctaaagaagttggaacaagatcctgaaactttcctgatcattataa

SEQ ID NO: 675 - DNA, 534 bp, Homo sapiens
  CDS 13..234
tttttttccactatggcttccagcactgtcccggtgagcgctgctggctcggctaatgaaactcccgaaataccggacaacgtgggagattggcttcggggcgtctaccgctttgccactgataggaatgacttccggaggaacttgatactaaatttgggactctttgctgcgggagtttggctggccaggaacttgagtgacattgacctcatggcacctcagccaggggtgtagccaagtagacaaatggaatcctgtgctgaacccgaatcttccaaaaaacagcctacaatctgtgaccaccacaagatgtgccctgatggcagctgaagtttgattcagatgggcacttttcttccccttccctgcctagtttccttttgttccttgagtccacgcagaattccattctctggtcagcagacaggcttaagctaaagtattgcctctattctgtaaagttctgtacatagttcccaagcttctgcagggggtgatttttgctcttgtcctgagaaataacagtgctgt

SEQ ID NO: 676 - DNA, 509 bp, Homo sapiens
  CDS 125..367
  Unsure 91: n = a, g, c or t
  Unsure 461: n = a, g, c or t
  Unsure 179..181: Xaa = Arg or Ser
  Unsure 344..346: Xaa = Asn or Lys
  Unsure 347..349: Xaa = Arg or Leu
agccgagcctgcggaaggcggcggcggcggcacctgcgatcagcggctggggcaggttatggtagtgcggactgcggtgtgagcagagcgnccacggggcccgccatgcgccggcggccctgacatgggcgccacgggtccaaagctcggggcctgtggccttcgcctcggcggccggagsggcggctcagaggcagcaggagctgagcaagctttggtrcggcctcggggccgagctgtrccccccttcgtattcacgcgccgcggctctatgttctatgatgaggatggggatctrgctcacgagttctatgaggagacaatcgtcaccaagaacgggcagaakckggccaagctgagggcatcgtgaagctggatcasccccgcatccacgtggatttccctgtgatcctctatgaggtgtgacccctgggaggtggcagacagaagcaccccctgcnccggcaagaaactcccaggctcaatcaaggtgtggcttccatttgagg

SEQ ID NO: 677 - DNA, 591 bp, Homo sapiens
  CDS 101..304
gcggaagtgctgcttactgggtcctgaatcggctgcgtgctgttctaggcatctttcaccctgaagtcacgggaacaacgctgaggggcagccagagattatgtgggcttttccatgggaagaaccactctacgttatcaccttctacatagtagcagttgaagccaaatggacagaaagcccgagacaacatgaagttgttctacaagttattttggagaaattgacttaccataccactcatcaacccatgcaaaagcctgtctatgtccaatcagcagaatgtctcggaccacctaaaaagtaaaagaaggagactgaaataatagcatctttgatgaaaactatctggaagacaagttgttaacaattctggggatcttggtgattacagagttcttaatccctctgtccataggtgatgacaattacaggctgcctataggtcctatagtgctcacacacctccagcccttccccatggtgtacacacacttgcagtatattcatctctttgtcttatttgagagtagggctgggtgtgtgtacaaactaatgacaaatacttgacagtcacacagcagtgataca

SEQ ID NO: 678 - DNA, 348 bp, Homo sapiens
  CDS 11..331
  Unsure 65..67: Xaa = Glu or Gly
  Unsure 77..79: Xaa = Arg or Ser
  Unsure 89..91: Xaa = Tyr or *
  Unsure 92..94: Xaa = Lys or Thr
  Unsure 230..232: Xaa = Gly or Val
  Unsure 308..310: Xaa = Trp or *
  Unsure 314..316: Xaa = Gln or His
  Unsure 320..322: Xaa = Gln or His
  Unsure 329..331: Xaa = Gly or Val
aaaaaacaacatgccacagttaaaacttacttcagtttggacaactactcacagctactacacagrgacccgaacgagktcacctggdtakamacctggaccaccaccaatggatatwcaaatggcaaacaattttactccgccctctgcaactcctcagggaaatgactgtgacctctatgcacatcacagcacggccagtatagtaatgcctctgcattacagcctcgkcttcatcattgggctcgtgggaaacttactagccttggtcgtcattgttcaaaacaggaaaaaaatcatctcaccttgrgcccamccccamcccattgkctaatctgtagaagctaa

SEQ ID NO: 679 - DNA, 503 bp, Homo sapiens
  CDS 194..409
catctcccaccaggccccacctgcaacactggggatcaaatttcaacacgagatttggaaggggcaaatatccaaactgtatcagcactctttgaaagattacagagtaaatatctttcttcgtcagaaatggaatgatccccgcctcgcgtacagtgaatatcctgacgactctttagacctcgacccctccatgttggactccatttggaaacctgatttgttctttgccaatgaaaagggtgccaactttcatgaagtcactacagacaacaaattgctaagaattttcaaaaatggaaatgttctttattcaataagattaacattaacactttcctgtccaatggatctcaagaattttcccatggatgtacaaacatgtataatgcaactggaaagcttggtttaaaatgacaagataaaagattgtaaatcggtggaaccactggaaagtaggcaaaaagagtttaacctactggaaagcaagagctgtcagaatc

SEQ ID NO: 680 - DNA, 561 bp, Homo sapiens
  CDS 256..426
ttgaagatttttttggtatattctagatgttaatctcatcctgtcttctgtttatcaactttgtcaatggtaactttgagaaatttttagttttgatatagccccagtccattaatttttgccttaggttgcactttaagagtataagatatttttccttaccccaagattacaaagatattctgtattctgtcagctttccagttttacctttcacattgagggctttattctatttgaagttcatcttcatatatgggaaaacaaaggaatctcacattatttttttcctttccattctgtgagacagttttcctaaatcatctattaaacagtgtattctttccttcatatagttttgtggagccacttttatcatacctcagattcccacagacacatattagtttactttttcaactttattaagagttattaaggctgagcgtggtggctcaatgcctgtaatcccagcactttgggagactgaggtgggaggattgtttgagtccaggagttcaagaccagcctgggcaacatggagagaccctgtctctacaa

SEQ ID NO: 681 - DNA, 520 bp, Homo sapiens
  CDS 21..326
ctttggcttccccaccggcaatggagcggttgacgttgcctctcggcggcgcggcggcggtggacgagtacctggagtaccggagaattgttggtgaggatgatggagggaaactttttactcctgaagaatatgaagaatacaaaagaaaagttttacctctgcgcttacaaaacagattatttgtgagctggcggtcaccaacagggatggattgtaaacttgtgggcccagagacactgtgtttttgtacacataggtataaacaacataaaactgacttggaagcgattcctcagcagtgccccattgatccccctgccaagtgactggctgccagtgcagggcttacctttatgtccccttgaatggtagccagcccattcgctgcaggtgcaaacactttgctgatcagcacagtgctgcgcctggctttacatgcaatacatgttccaagtgttcaggattccatagctgcttcacttgtgcttgtggtcagcctgcatattggycatgacac

SEQ ID NO: 682 - DNA, 513 bp, Homo sapiens
  CDS 85..396
  Unsure 274..276: Xaa = Gln or His
actttctcggggtgtctgcgtaactgcccagacttgccttggtttggtcagatgacctcctctgggactggctagccagcgttcatgtctacattattgatctcgtcttccgatgccttattggaggaactggaacgctccacccttcaggacagtgatgaatattccaacccagctcctcttcccctggatcagcattccagaaaggagactaaccttgatgagacttcggagatcctttctattcaggataacacaagtcccttgccggcgcastcgtgtatactaccaatatccaggagctcaatgtctacagtgaagcccaagagccaaaggaatcaccaccgccttctaaaacgtcagcagctgctcagttggatgagctcattgctcacctgactgagatgcaggccaaggttgcagtgagagcagatgctggcaagaagcacttaccagacaagcaggatcacaaggcctccctggactcaatgcttgggggtctcgagcaggaat

SEQ ID NO: 683 - DNA, 521 bp, Homo sapiens
  CDS 317..505
  Unsure 431..433: Xaa = Phe or Val
  Unsure 482..484: Xaa = Pro or Ser
  Unsure 485..487: Xaa = Ala or Pro
  Unsure 494..496: Xaa = Gly or Val
aagggaatctccgggcggggtagtgcaggcgccgggtttcccgcggtccgagctggcgcgggcggaggagaatcgctcttaaagggccagcgcacacgcgttcttttgttccggggccgcaggcggggcaggcccgactttcgccgtcttcttgtctactctccagaacggccatgatttcccaattcttcattctgtcctccaagggggaccgctcatctacaaagacttccgcggggacagtggcggccgggatgtggccgagctcttctaccggaagctgacgggactgccaggagacgagtccccggttgtcatggactatggctatgtacagaccacatccacggagatgctgaggaatttcatccagacggaagctgtggtcagcaagcccttcagcctctttgacctcagcagcgttggcttgkttggggctgagacacaacagagcaaagtggccccccagcagtgcagccagycgscccgtcctgkccagtcgctctgaccagagccaaaag

SEQ ID NO: 684 - DNA, 462 bp, Homo sapiens
  CDS 2..196
aatgctcagcgcgctgcccggctggggacccgcgcacctgcagcgcccgctgctcggccctgcatcctgcctgggcatcctgcgcccggccatgacggcgcactcattcgccctcccggtcatcatcttcaccacgttctggggcctcgtcggcatcgccgggccctggttcgtgccgaaggacccaaccgcggagtgatcatcaccatgctggtcgccaccgccgtctgctgttacctcttctggctcatcgccatcctggcgcastgaaccccctgttcgggccccagctgaagaatgagaccatctggtacgtgcgcttcctgtgggagtgacccgccgcccccgacccaggtgcccagctctcggaatgactgtggctccactgtccctgacaaccccttcgtccggaccctcccccacacaactatgtctggtcaccagctccctcctgctggcacc

SEQ ID NO: 685 - DNA, 513 bp, Homo sapiens
  CDS 128..376
  Unsure 251..253: Xaa = Asp or Glu
atctggatatttctcacatttgccttggtttgatgctcctggagttcccaaaagaatagagatcactttatcaagcttgcagaacaggttgcatgattgttgtgctgctgcttgctagtaaaagtttatgcttgtagaaagaaaagttaatgggctggtgccgcggctcatgcctgtaatcgcagcacattgggaggcccaggtgggcgcatcacttgagggttccagcatcttggacagagctgttattgawcacaatttgttgtctgcaagcaaattatataataatattaccttcgaagaacttggagctcttttagagatccctgcagctaaggcggaaaagatagcatctcaaatgataaccgaagacgtatgaatggatttattgaccagattgatggaatagttcattttgaaacacgagaagccctgccaacgtgggataagcagatccaatcactttgtttccaagtgaataacctttttggagaaaattagtcaaacagcacc

SEQ ID NO: 686 - DNA, 498 bp, Homo sapiens
  CDS 118..399
aacaattcatgaagttgaagaaaagacactgtcagaaatgaacacagaagcggasaacagcttctccatcacgccagaaatggcaatgctgaagaagtaagacaactattagagaccatggcgagtaatgaagtgattgctgacattaattgcaaaggaagaagtaagtctaacttgggctggacacccctacatctggcatgctattttggacacagacaagtggtccaggatctgttgaaggctggtgcagaagtgaatgtgttgaatgacatgggagacacgccgcttcatcgagctgcctttacaggacgaaaggtgaaaatcattctatgttcaatgtttgtaagtgaggtatttggaggagtagttaccattgttttctctgttataaccatctgaccagcaaccgagaaagccacacaaaaaaatgtatacaccagcactttgggtcaaaggccacaggatcttttgagtctgacagtgaggtccagtact

SEQ ID NO: 687 - DNA, 550 bp, Homo sapiens
  CDS 82..306
agtctcgccagctgccggtctttcgggggctccgtaactttctatccgtccgcgtcagcgcttgccaccctcatctccaatatgcctggtccgacccccagtggcactaacgtgggatcctcagggcgctctcccagcaaagcagtggccgcccgggcgggggatccactgtccggcagaggaaaaatgccagctgtgggacaaggagtgcaggccgcacaacctcggcaggcaccggggggatgtggcgattctacacagaagattcacctgggctcaaagttggccctgttccagtattggttatgagtcttctgttcatcgcttctgtatttatgttgcacatttggggcaagtacactcgttcgtagattcagttacatccatctgtcatctgaagaaggaggaaaaaacccaacatttcttggaccaaaagtatagtgactatctgttcatgagagaaattttctgtaagcttgctgttttacaggggatttatcaataattgattttgaggaatcagtttttttctatggctaataaacttttt

SEQ ID NO: 688 - DNA, 501 bp, Homo sapiens
  CDS 8..487
  Unsure 296..298: Xaa = Cys or Trp
  Unsure 326..328: Xaa = Trp or *
agctcctatgaggcccctgccgccggtcggcgatgtccggctggagctgtcgcctccgccgccgctgctgccggtgccggttgtgagcgggtctccagtcggctcctctgggcgtctcatggcctctagcagctccctggtgcccgaccggctgcgcctgccgctctgcttcctgggtgtctttgtctgctatttttactatgggatcctgcaggaaaagataacaagaggaaagtatggggaaggagccaagcaggagacgttcacctttgccttaactttggtcttcattcaatgkgtgatcaatgctgtgtttgccaagatctgrtgggatcgtacccggagctggctctatgctgcctgttctatctcctatctgggtgccatggtctccagcaattcagcactacagtttgtcaactacccaactcaggtccttggtaaatcctgcaagccaatcccagtcatgctccttggggtgacctcttgaagaagaagtac

SEQ ID NO: 689 - DNA, 494 bp, Homo sapiens
  CDS 282..461
attttcttaatttttcagaactttaaacagatatgtaatttaaaagatgcagcccctcctgtgcatgccctcctcatgctgcccctctgttccagggcccacctttcctgtcctttgaggaggacccgcggcagcaggcactggagctggtggtgcaggaggtctccagcgtgctcaggtcggcggaggagaaggtggtggtctgtcacgtggtgggccaggctattcagttcttggtcagcgagacgcctgccttgggtgctggatgccggctgtacgacatgcggctctcccctttccatttacagctggagttccacatgaaggagaagagagaggacctccagattagctggtctttcatcagtgtgccggaaatggccgttaatatccagcccaaacactgggggaggaccaggtggctgagacaagtgcgatgtctgacgttctcaaggacatcttgaagcatttggctggttctgcctctccatcag

SEQ ID NO: 690 - DNA, 582 bp, Homo sapiens
  CDS 120..530
aaagtcgtgctgcaggcgtcgcgccaatcttcgctctgaggtgctgtctcaccggtgagacctggaagcgggcgagtctcgtgctgtgtcggacctgcagcccctggccttccgccaccatggagtacctcatcggtatccaaggccccgactatgttcttgtcgcctccgaccgggtggccgccagcaatattgtccagatgaaggacgatcatgacaagatgtttaagatgagtgaaaagatattactcctgtgtgttggagaggctggagacactgtacagtttgcagaatatattcagaaaaacgtgcaactttataagatgcgaaatggatatgaattgtctcccacggcagcagctaacttcacacgccgaaacctggctgactgtcttcggagtcggaccccatatcatgtgaacctcctcctggctggctatgatgagcatgaagggccagcgctgtattacatggactacctggcagccttggccaaggcccttttgcagcccacggctatggtgccttcctgactctcagtatcctcgaccgatactacacaccgactatctcacgtgarag

SEQ ID NO: 691 - DNA, 506 bp, Homo sapiens
  CDS 4..168
aagatggcggaccgtggcggcgtgggtgaagccgcagctgttggagcgtctcctgcatctgtccctggcctaaacccgacgctaggctggagggagcgactgcgtccgggctggcggggactggggcctcgttgtggttcgtggcggggctggggctgctttacgccctgaggatccctttgaggctgtgtgagaatttggcagcggtgactgtatttttaaattcattgacacccaaattctatgtggcacttacagggacctcttcattgatatcaggactaatatttatatttgaatggtggtacttccataagcatggcacatcttttattgagcaagtatctgtaagccatttgcaaccactgatgggaggaacagagagcagcatttcagaaccaggttctccttcgaggaacagagaaaatgaaaccagcagacagaatttgtcaggtgactacttttctaatgtgttttcagagctgtgtatttaagattgagtttgg

SEQ ID NO: 692 - DNA, 499 bp, Homo sapiens
  CDS 64..459
gtcctctgggccacgctccacttgcccgcttccacccggaaagccccccaggctgagtgcggcatgatctccatcaccgaatggcagaagattggtgtggggatcaccggtttcggcatcttcttcatcctctttggaacactcctgtactttgattccgtgctcctggcctttggaaacctgctgttcctgacgggcctgtccctcatcattggcctgaggaagaccttttggttcttcttccaacggcacaaactcaagggaaccagcttcctcctggggggtgtggttatcgtgctcctacgctggcccctcctcggcatgttcctggaaacctacggattcttcagcctctttaagggctttttccctgtcgccttcggcttcctgggcaatgtctgcaacatccccttcctgggtgcgctgttccggagacttcaaggcactagctcgatggtctgaaaacagagatgagctccttgaacttggatcattggtt

SEQ ID NO: 693 - DNA, 756 bp, Homo sapiens
  CDS 188..616
attttattacccggagtcctggttcctgggccagaccggtgtgtcgtttttggcccaagctagagaatgttaagggcttctgcggtgggttggtgctagaggcgccgcgaacaggtgctgcgggggcggcgcgggaggcggtgcccttgcttccggatccggtctcagctctgggagggaacgggagatgttgcaggcgccgagagggcgggccagggccgcactccggagactcgcggttgctacgcgcaccatggctggagcgcccacggtctcgcttcctgaactccgttcactcctagcctccggacgggcccggctcttcgacgtgcgctctcgcgaggaggcggcagctgggaccatcccaggggcgctcaacatcccggtgtccgagttggagagtgctctgcagatggagccagctgccttccaggctttatattctgctgagaagccaaagctggaagatgagcatctcgttttcttctgtcagatgggcaagcggggcctccaggcacgcagctggcccggagtcttggatacactggggctcgcaactacgctggagcctatagagaatggttggagaaagagagttaggcaggaggcagcttactgattgccaccccctggccccttaatggccaccttaactaagggtgtgaacgggctgacttggtgaattgggcaactccttatagtgttgtgcacacaaaagcatcaaataaagaacatttaatcaaaaaaaaaaaaaaw

SEQ ID NO: 694 - DNA, 563 bp, Homo sapiens
  CDS 296..463
aatgtttaatgcccgcacctcgtccccggccaccccgtgaggcagccagacactctccaaaaagcagagacagcaggaagaggggagtggaggcagcccattcacctggggaaatgactgggttgtcgatggacggtggcggcacccaagggggacgtggacccgttctactatgactatgagaccgttcgcaatgggggcctgatcttcgctggactggccttcatcgtggggctcctcatcctcctcagcagaagattccgctgtgggggcaataagaagcgcaggcaaatcaatgaagatgagccgtaacagcagcctcggcggtgccacccactgcactggggccagctgggaagccaagcatggccctgcctctggcgcctccccttcttccctgggctttagacctttgtccccgtcactgccagcgcttgggctgaaggaagctccagactcaatgtgacccccaggtggcatcgcaactcctgcctcgtgccacctcatgcttataataaagccggcgtcagagaccgctgcttcccycaaaaaaaaaaaaaaaa

SEQ ID NO: 695 - DNA, 502 bp, Homo sapiens
agaggccctacacccaccgaggcatggggctccctgggctgttctgcttggccgtgctggctgccagcagcttctccaaggcacgggaggaagaaattacccctgtggtctccattgcctacaaagtcctggaagttttccccaaaggccgctgggtgctcataacctgctgtgcaccccagccaccaccgcccatcacctattccctctgtggaaccaagaacatcaaggtggccaagaaggtggtgaagacccacgagccggcctccttcaacctcaacgtcacactcaagtccagtccagacctgctcacctacttctgcygggcgtcctccacctcaggtgcccatgtggacagtgccaggctacagatgcactgggagctgtggtccaagccagtgtctgagctgcgggccaacttcactctgcaggacagaggggcaggccccagggtggagatgatctgccaggcgtcctcgggcagcccacctatcaccaacag

SEQ ID NO: 696 - DNA, 589 bp, Homo sapiens
gtccctcctcctagttgcagtctggtagttgtcgctggccgtgtgacggctcgctgttgccctgaaggcaggcgagccagctgcccaggaaaggtggaaagtggtagaagctgacccctgagccctggcaggtctttaagtgcgtttgtgcagccgatttcaaggctaagagagaaagactgcctctgatccctgaaggaagaaaaaaaaaaaaaaamcgggaaaaaaactcaacwkggaaaatgtccccarggaaaacaaakttgtggaraaggccccagtgcaraatgaagcccccgctttaggaggtggtgaataccaggagcctggaggaaatgttaaaggggtttgggctcmacytgccccgggtttkggagaggatgtgcccaataggcttgtcgataacattgatatgatagatggagatggagatgatatggaacggttcatggaggagatgagagagctaaggmggaaaattagggaacttcagttgaggtactctgcgcattcttataggggaccctcctcaccatgatcatcatgatgagttttgccttatgccttgaatcttgaggttaataatcat

SEQ ID NO: 697 - DNA, 420 bp, Homo sapiens
gattcataggagcatataatataatctttgtaaagtagagggacaattcagtattttgtacaatatgtagaataacatgttctcttagtaggcataggatatactacattaagaaatctgggctaagcgtggtggttcatgcctgtaatcccagcactttgggaggccgaggcgggcggatcacttggggtcaggagttcgggaccggcctggccgacatggtgaagccccgtctttactagaaatacaaaagttggccgggcgtggtggtgggcgcctgtggtctcagctactcggggggctgaggcgggagagtcacttgaacccgggaggcggaggttgcagtgagccgagatcacgccactgcactccagcctggatgacagagtgagactctgtctcaaaaaaaaaaaaaaaaaa

SEQ ID NO: 698 - DNA, 496 bp, Homo sapiens
gacataatcagagctatgctggaggagaagagggcagccatttgctggctggcttgcagtgagccaggaggtggcaggacgagttaggaggctggttcagtagctcgggcaagagcagggccccccaggatctgaaggcctcccaggcccccaggcccagcgggtcccagaggagagcgaggaccccaaggtaactccggtgagaagggcgaccagggatttcaaggccagccaggctttccgggcccaccgggtccccctggattcccaggcaaagttggatcacctggcccacctggccctcaagcagagaagggcagcgaagggattcgaggcccatcaggcctgcctggctcccctgggccaccgggacctcctgggattcagggccccgccggtctggatggtttggatgggaaggatggcaagcctggcttgaggggggacctggtcctgctggcccccctggactcatgggaccaccgggctttagggg

SEQ ID NO: 699 - DNA, 729 bp, Homo sapiens
atctctgagcctccgcggccttctctagcaaaatggtggagccggtacccggctgtaaggcaagctgggatgcgcggagtagcgggtggaaaactggastggagttctcactcggccgctgggtgacttcggtgcactagggatagtaacagtaccacctcgtagggttgtagaaagacmaagtgagttaatatttgtaaagtgtttagaacagcgtctactgcatggaaagtagtatttatttgttagagagactccaggaggtcttgcccagggattgacttctccsttccstgtctccascccccasattcmcgtttgtgagccaagccttgcttttgcaccggccgggctctcttgcctggaaatgcatacccatctcaaacctgggctttaaaatcacctcctctgggacgccttcctctacttctcacagttcaggcctgttctgccccacacagcagaaaatgcccacgatgcaataccagagtctgcatgggaccatttcaacaacccttagaagctgactcagctgtctcctggccctgacttttctaagatgagaggagctgataggaacaatttgggaaccctcaaaggctgagagtatcccacccacttcacagatgaagcaaactgaggcccagagaagggaaattacttgcccaagatcacccagcaagtaagaaacagagctggagatgagctcaggccagcacggkaccacgc

SEQ ID NO: 700 - DNA, 462 bp, Homo sapiens
caggaaaatcgcgagggacgggcggccccccgacagtccagctcctttcggctcttgcaggaagccctggaggctgaggagagaggtggcacgccagccttcttgcccagctcactgagcccccagtcctccctgcccgcctccagggccctggccacccctcccaagctccacacttgtgagaagtgcagtaccagcatcgcgaaccaggctgtgcgcatccaggagggccggtaccgccaccccggctgctacacctgtgccgactgtgggctgaacctgaagatgcgcgggcacttctgggtgggtgacgagctgtactgtgagaagcatgcccgccagcgctactccgcacctgccaccctcagctctcgggcctgagccgccatgccctcagcctgcctcactgctgggccagggtcatgcctatataagttggcatggcagggacaatggtgggca

SEQ ID NO: 701 - DNA, 417 bp, Homo sapiens
aatgctcagcgcgctgcccggctggggacccgcgcacctgcagcgcccgctgctcggccctgcatcctgcctgggcatcctgcgcccggccatgacggcgcactcattcgccctcccggtcatcatcttcaccacgttctggggcctcgtcggcatcgcgggccctggttcgtgccgaaggacccaaccgcggagtgatcatcaccatgctggtcgccaccgccgtctgctgttacctcttctggctcatcgccatcctggcgcastgaaccccctgttcgggccccagctgaagaatgagaccatctggtrcccagctctcggaatgactgtggctccactgtccctgacaaccccttcgtccggaccctcccccacacaactatgtctggtcaccagctccctcctgctggcacc

SEQ ID NO: 702 - DNA, 470 bp, Homo sapiens
gcgcgcccgccgcgtgcccagcccgggtagctgctgcagcctacgctgcctcggcactgcctgccgcgtgcggagccggagcccgagcctgagtggcgccgggcccgacgtggggctcctgggccgcggcggcgggcgggcgatgctccagaggcctgaccagccatggaggccgaggcaggcggcctggaggagctgacggacgaggagatggcggcgctaggcgaagagctagtgcggcgcctgcggcgggaggaggcggcgcgcctggcggcactggtcagcgcggccgcctcatgcaggaggtgaatcggcagctgcagggccacctgggcgagatccgcgagctcaagcagctcaaccggcgtctrcaggcagagaaccgtgagctgcgcgacctctgctgcttcctggactcggagcgccagcgcgggcggcgcgccgcacgccagtggcagctcttcgggacc

SEQ ID NO: 703 - DNA, 452 bp, Homo sapiens
aatgcgcaagaaggtgcctgcgggactggagcagagsggctgcgagggtcttcccagcgcaggcgggttttccagtgttacttgcggctgggcgtgggggactagctgcctttctggcacaggcaggaagccgcaaaaagtttctgagcccccgaacctgtagcggacgtggaaaaagaacgcccctcctcaagtgtctggctgaaagatgccacccagggaakggaactcgggctagctaaggaggccattcttgatgttgcttctagatctcatgtcatcaccgagccctcagctgctggtggcagctgctcagcagacccttggcatgggaaagagacggagtccaccccaagccatctgccttcacttagctggagaggtgctggctgtggccggggactgaagccagctgtgctctatgattgcaactgtgcaggggcatcagagct

SEQ ID NO: 704 - DNA, 304 bp, Homo sapiens
atttcgggagcgggattgtttcgcgcaggaagcaggctccattttagcgccgcccgccgtcgccatctgtttcccttccctcccccatacctagcccgagtctgagccctaacgagaaggctgggcctaggccgctggatgctggagtgaaaggaagggagaaagggaaaaagcgggaagagtcgagaagggagtgttaagaggccaagtgcgacgcgcgtatccgggcagacggactgacggacgggcccgtgcttctgccgcggctgcgcccggggcctcttaaccactgatctttgaaata

SEQ ID NO: 705 - DNA, 269 bp, Homo sapiens
  Unsure 84: n = a, g, c or t
  Unsure 216: n = a, g, c or t
agtcgtggactcgtgcagctggggcgtccgcagccgctcgtcacccgcgtgatgctgtttctggcgttgggcagcccgtggggntcgaactgcctctctgcggaaggaggactgcattgtgtgcggccgccgcgctccgaggtccccgggcctctgtctcccgggcgtcctccagsagcgggysttcggggmgggtagccggctggagtacgggmncttcgggagccgcgcgccttctccggcgtccgggtcgagcgcagatccctgtt

SEQ ID NO: 706 - DNA, 476 bp, Homo sapiens
atttgttcagcctccataattcgaataccagggcaggccgagccagccgtgcgccgcgctccagggcccagggcgccgcacacgcatccacccacccacccagcctcgcagcgccatgggcaagaacaagcagccacgcggccagcagaggcaggggggcccgccggccgcggacgccgctgggcccgatgacatggagccgaagaagggcacgggggcccccaaggagtgcggggagggatcattgtctgcttagtggcctatcttggcttgtttatgctttgtgtctcatatcaggttgacgaacggacatgtattcaattttctatgaaactgttatactttctgctgagtgccctgggcctgacggtctcgtgtgctggccgtggcctttgccgcccaccactattcgcagctcacacagtttacctgtgagaccacactcgactcttgccagtgcaaactgccctcctcgg

SEQ ID NO: 707 - DNA, 266 bp, Homo sapiens
ctctgcgtgcgccggaggctgccgtggcgggtgggccgcctgacttctcctcccggccagttctcgagcgcctcaccgggcctcgccctgcagcctcgctctcgctggcgctgcgcggcctaggggactgggctgctggcctccgggtgcggggtgggggcaggctccgacctggggcgtcctggcagcgcgagccgcgggatgggggcccgggccgcggaggaggcrccgctggygtgtcccttggtggagagggcgctgccggy

SEQ ID NO: 708 - DNA, 384 bp, Homo sapiens
aaaaaacaacatgccacagttaaaacttacttcagtttggacaactactcacagctactacacagagacccgaacgagtcactgatatacacctggaccaccaccaatggatatacaaatggcaaacaattttactccgccctctgcaactcctcagggaaatgactgtgacctctatgcacatcacagcacggccagtatagtaatgcctctgcattacagcctcgtcttcatcattgggctcgtgggaaacttactagccttggtcgtcattgttcaaaacaggaaaaaaatcatctcaccttgagcccacccccaccccattgtctaatctgtagaagctaataaataatcatccctccttgcctagcaaaaaaaaaaaaa

SEQ ID NO: 709 - DNA, 497 bp, Homo sapiens
ctcttttgctytaacagacaagccascgaytttaggctggataatagtcaaattcttacctcgctctttcactgctagtaagatcagattgcgtttctttcagttactcttcaatcgccagtttcttgatctgcttctaaaagaagaagtagagaagataaatcctgtcttcaatacctggaaggaaaaacaaaataacctcaactccgttttgaaaaaaacattccaagaactttcatcagagattttacttagatgatttacacaatgaagaaagtacatgcactttgggcttctgtccctgctgcttaatcttgcccctgamcctcttaatgctgattctgaggaagatgaagaacacacaattatcacagatacggagttgccaccactgaaacttatgcattcattttgtgcattcaaggcggatgatagcccatgtaaagcaatcatgaaaagatttttcttcaatattttcactcgacagtgcgaagaat

SEQ ID NO: 710 - DNA, 471 bp, Homo sapiens
  Unsure 423: n = a, g, c or t
attcccaactgccagtgatctctgaagccgactctgaggctccctctttgctctaacagacagcagcgactttaggctggataatagtcaaattcttacctcgctctttcactgctagtaagatcagattgcgtttctttcagttactcttcaatcgccagtttcttgatctgcttctaaaagaagaagtagagaagataaatcctgtcttcaatacctggaagaaaaacaaaataacctcaactccgttttgaaaaaaacattccaagaactttcatcagakattttacttagatgatttacacaatgaagaaagtacatgcactttgggcttctgtatgcctgctgcttaatcttgcccctgcccctcttaatgctgattctgaggaagatgaagaacacacaattatcacagatacggantgccaccactgaaacttatgcattcattttgtgcattcaagtcggatg

SEQ ID NO: 711 - DNA, 405 bp, Homo sapiens
aatgatcctgcagcagcccttgcagcgaggcccccagggaggggccagcgcctcccgcgggccgccttgggggtgacttggggcctggacgccagctcccctctccgaggagctgtgcccatgagcaccaagcggcgcctggaggaggagcaggagcctctgcgcaagcrrtttctgtctgaggagaacatggccacccacttctctcaactcagcctgcacaatgaccacccctactgcagcccccccatgaccttctccccagccctgcccccactcaggagcccttgctctgagctgcttctctggcgctatcctggcagcctcatccctgaggccctccgtctgctgakgctgggggacacccccatgttccccctaccctgcaaccccagctggggacat

SEQ ID NO: 712 - DNA, 160 bp, Homo sapiens
  Unsure 105: n = a, g, c or t
aagaaacccaatgatcctgcagcagcccttgcagcgaggcccccagggaggggccagcgcctcccgcgggccgccttgggggtgacttggggccwggacgssagntccccyctccwaggagctgtgcccatgagcaccaagcggcgvctggaggaggaga

SEQ ID NO: 713 - DNA, 427 bp, Homo sapiens
caatcttcgctctgaggtgctgtctcaccggtgagacctggaagcgggcgagtctcgtgctgtgtcggacctgcagcccctggccttccgccaccatggagtacctcatcggtatccaaggccccgactatgtkctkkkkhvggcytccgaccgggtgggccgccagcaatattgtccagatgaaggacgatcatgacaagatgtttaagatgagtgaaaagatattactcctgtgtgttggakaggctggagacactgtacagtttgcagaatatattcagaaaaacgtgcaactttataagatgcgaaatggatatgaattgtctcccacggcagsagctaacttcacacgccgaaacctggctgactgkcttcggagtcggaccccatatcatgtgaacctcctcctggctggctatgatgagc

SEQ ID NO: 714 - DNA, 433 bp, Homo sapiens
agactgcgtgcagaaggtgactgtctcagtggagctgggtcatctcagcaggccttggctccttgaacttttggccgccatgtgcttcccgaagtcctctctgatgacatgaagaagctgaaggcccgaatgcaccaggccatagaaagattttatgataaaatgcaaaatgcagaatcaggacgtggacaggtgatgtcgagcctggcagagctggaggacgacttcaaagagggctacctggagacagtggcggcttattatgaggagcagcacccagagctcactcctctacttgaaaaagaaagagatggattacggtgccgaggcaacagatcccctgtcccggatgttgaggatcccgcaaccgaggagcctggggagagcttttgtgacaaggtcatgagatggttccaggccatgctgcagcggc

SEQ ID NO: 715 - DNA, 326 bp, Homo sapiens
  Unsure 126: n = a, g, c or t
atggcggtcttggcacctctaattgctctcgtgtattcggtgccgcgactttcacgatgkctcgcccaaccttactaccttctgtcggccctgctctctgctgccttcctactcgtkaggaaactnccgcygctctgccacggtctgcccacccaacgcgaagacggtaacccgtgtgactttgactggagagaaktggagatcctgatgtttctcagtgccattgtgatgatgaagaaccgcagatccatgccccatgaagagggacaaagaatgggatataggagtgcacagcccagcctgacctgtgacatctctgtgtttca

SEQ ID NO: 716 - DNA, 507 bp, Homo sapiens
agactgaggctgaggctggggaacatcgggcagcatgagcgctgcggctcttcctgcgcaccacggctgcggctcgtgcctgccggggtctggtggtctctaccgcgaaccggcggctactgcgcaccagcccgcctgtacgagctttcgccaaagagcttttcctaggcaaaatcaagaagaaagaagttttcccatttccagaagttagccaagatgaacttaatgaaatcaatcagttcttgggacccgtggaaaaattcttcactgaagaggtggactcccgaaaaattgaccaggaagggaaaatcccagatgaaactttggagaaattgaagagcctagggctttttgggctgcaagtcccagaagaatatggtggcctgggcttctccaacaccatgtactcacgactaggggagatcatcagcatggatgggtccatcactgtgaccctggcagcgcaccaggctattggcctcaaggggatcatcttggctggcactg

SEQ ID NO: 717 - DNA, 561 bp, Homo sapiens
cttcagaatgctggatgaaaaaattgaaaagggtcgggattactgttcggaagaagaggatatcacatagcaccaattttaccactcaaaccaggagctactactgtgtaaataggttacaccccagttgaaatctttgcaaaggtcggttctattcagcgaacagcactatagcaaaagaagatcgttccatattgtacgccccattaaattacagtgtttcttaatgaacttgcaaaggaatattgctaaaaacaaacaaaaaaaactgttatctaactttctttgttgctgctagttaaaacttgttgcaacttttcacttctcttgtgtccaggtatgcagcaaaattctgcaatttcaccttaaagatactgttggttttacagatgctctccaacctattttctataagatgaggtagtggtgaactcagataacaaacttctcttctaaactggttctgcttctaagacaagcatctcctgccctctctccttcctccccatctctcgcacgcagtctagagatggactgagccttgcttctcactggcagtgt

SEQ ID NO: 718 - DNA, 530 bp, Homo sapiens
aacatctggggacagcgggaaaacatgagtgactccaaggaaccaagggtgcagcagctgggcctcctggaagaagatccaacaaccagtggcatcagactttttccaagagactttcaattccagcagatacatggccacaagagctctacagggtgtcttggccatggcgccctggtgctgcaactcctctccttcatgctcttggctggggtccttgtggccatccttgtccaagtgtccaaggtccccagctccctaagtcaggaacaatccgagcaagacgcaatctaccagaacctgacccagcttaaagctgcagtgggtgagctctcagagaaatccaagctgcaggagatctaccaggagctgacccagctgaaggctgcagtgggtgagttgccagagaaatccaagctgcaggagatctaccaggagctgacccggctgaaggctgcagtgggtgagttgccagagaaatccaagctgcaggagatctaccaggagctgacccggctgaaggctgcagt

SEQ ID NO: 719 - DNA, 512 bp, Homo sapiens
aataatgctcccatcaaatgtcatcaacttctcccaagcagagaaacccgaacccaccaaccaggggcaggatagcctgaagaaacgtctacaggcaaaagtcaaagttattggggtgcatagcagcctggctggaagattctgagtgctctgtctgccctggtgggtttcattctcctgtctgtcaacccggctgcattaaatcctgcctcattgcagtgtaagttggacgaaaaggatataccaaccagacttcttctttcttatgattatcattcaccttacaccatggactgccatagagccaaagccagtctggctggaactctgtctctgatgctggtttctactgtgttggagttctgcctagctgtgctcactgctgtgctgcagtggaaacagactgtctgacttccctggttactcatgtcctcaaagacgactcatgaygctggatatgaagaactattgacttcttgggaaaaaacggagaaatattaattggaaagttt

SEQ ID NO: 720 - DNA, 507 bp, Homo sapiens
acctcgccagggccggggccgggacgggacggaaaactggcggcttggtttgttcagcgcgtcgcgtcatggctctcgtttcaggcctccacggtgtgcacctggagtcaggagcgcgcttgtgcgtacagttcggttcagttactaaaagatgtaactgaactgcagatccttggtgaaatatctttcaacaaatctctatatgagggactgaatgcagagaaccacagaactaagatcactgtcgtcttcctgaaagatgagaagtaccattctttgcctatcatcattaaaggcagcgttggtggacttctggtgttgatcgtgattctggtcatcctgttcaagtgtggcttttttaaaagaaaatatcaacaactgaacttggagagcatcaggaaggcccagctgaaatcagagaatctgctcgaagaagagaattaggacctgctatccactgggagaggctatcagcagtcctgggacttggagacccagcatcctttg

SEQ ID NO: 721 - DNA, 408 bp, Homo sapiens
  Unsure 261: n = a, g, c or t
accttttttactttcacagcaatagtgcagaatccagaatggatgtcctctttgtagccatctttgctgtgccacttatcctgggacaagaatatgaggatgaagaaagactgggagaggatgaatattatcaggtggtctattattatacagtcacccccagttatgatgactttagtgcagatttcaccattgattactccatatttgagtcagaggacaggctgaacaggttggataaggacataacagaagcaatanagactaccattagtcttgaaacagcacgtgcagaccatccgaagcctgtaactgtgaaaccagtaacaacggaacctgtggaagaaggctgctatgactctttggatgggagtctggcaagaggaaattggaagataaaataaataa

SEQ ID NO: 722 - DNA, 371 bp, Homo sapiens
  Unsure 281: n = a, g, c or t
agagaaagatgttccaggcagagggaagaggcctctttcctccaggcctggagctttcatgacgctggtcattatcttgctgcatgtattctggggcattgtattttttgatggctgtgagaagaaaaagtggggcatcctccttatcgttctcctgacccacctgctggtgtcagcccagaccttcataagttcttattatggaataaacctggcgtcasatttataatcctggtgctcatgggcactgggcattcttagctgcgggaggcactgccganagcctgaaactctgcctgctctgccaagacaagaactttcttctttacraccagcgctccagataacctcagggaaccagcacttcccaa

SEQ ID NO: 723 - DNA, 404 bp, Homo sapiens
aagctaggagccgcgcragtcgtagtgtcgctgtttgcgggtctccgcgcgggaccggggcgcagggggtcgctgaggcgagggtgtcatgtcagacaacgaggacaattttgatggcgacgactttgatgatgtggakgaggatraagggctagatgacttggagaatgccgaagagttttagtagtgacggggttcaccgtgttagccaggatggtctcgatctcctgccttgtgatccgcccgcctcggcctcccaaagtgctgggattacaggaaggccaggagaatgtcgagatcctcccctctggggagccgaccgcagccaaccagaagcgaatcaccacaccatacatgaccaagtacgagcgagcccgcgtgctgggcacccgagcgctccagat

SEQ ID NO: 724 - DNA, 486 bp, Homo sapiens
aaagtggaaggcaacgacacacggcccgtggcgccttcagctagggagaaagagaggacgggggctggcgggcgggattagctgccggaggctgagtttccgcagcctgagtctccatctgtcgctagactggagtgcagtggcgcgatcttggctcacttcaacctccacatcctgggttcaagcgactctcctgcctcagcctcccaagtagctgggactacaggtgcgcaccaccatgttcaactaatttttgtaattttagtggagacgaggtttcaccatgttggccaagatggtctcgatctcttgaccttgtgatccacccaccttggcctcccaaaggtactgagattahagatgtgagccactgcgsctagccagaaaaatatttattgatcctaaagtgggagtcagcgccactgttgmtgctagtgttgaatccagaamcatagctggacatgggatcagaggatgaacaagaga

SEQ ID NO: 725 - DNA, 374 bp, Homo sapiens
aaaaaaaaagtcctagctagggtcccaagtgacagccagcatcaactataacatgtaaaggagccagtcttcagatgattccagcctcagccttcaggccactcagctggtgccaaatagagtagggatgagctgtccccacagagacctgcccagtgcacattgtgagaaagccccagaatgttgacagtcgctctcctagcccttctctgtgcctcagcctctggcaatgccattcaggccaggtcttcctcctatagtggagagtaaggaagtggtggtggaaagcgattctctcattctggcaaccagttggacggscccatcaccgccctscggtccgagtcaacacatactacatcgtaggtcttcar

SEQ ID NO: 726 - DNA, 523 bp, Homo sapiens
aacaagatggcggcgctgcgggacggctagcggccctgcgtggaggcgaggaatccgcatctatggagatgtccctgcatcccatgactcggagctgatggccttcatgacgaggaagttgtgggacctggagcagcaggtgaaggcccagactgatgagatactgtccaaggatcagaagatagcggccctagaggacctggtgcagaccctccggccacacccggccgaggcaaccctgcagcggcaggaggaactggagacgatgtgtgtgcagctgcagcggcaggtcagggagatggagcggttcctcagtgactatggcctgcagtgggtgggcgagcccatggaccaggaggactcagagagcaagacagtctcagagcatggcgagagggactggatgacagccaagaagttctggaagccaggggactcattggcgccccctgaggtggactttgacaggctgctggccagcctgcaggatcttagtgagctggtggtagagggtgacaccaaa

SEQ ID NO: 727 - DNA, 492 bp, Homo sapiens
attttgcgaacggcgagcagcggcggcggcgcggagagacgcagcggaggttttcctggtttcggaccccagcggccggatggtgaaatcctccctgcagcggatcctcaatagccactgcttcgccagagagaaggaaggggataaacccagcgccayccatccacgccagccgcaccatgccgctcctaagcctgcacagccgcggcggcagcagcagtgagagttccagggtctccctccactgctgtagtaacccgggtccggggcctcggtggtgctcctgatgcccctcacccacccctgaagatcccaggtgggcgaggaggaggagtagggybgcctcggggctgggcatccggcccctggggccaccccttgtcagccgggtgggtaggaaccgtagactcgctcatctcgcctgggtttgtccgcatgttgtaatcgtgcaaataaacgctcactccgaatttagcggtgtatttcttgaag

SEQ ID NO: 728 - DNA, 467 bp, Homo sapiens
acagggccactgctgctcacagaagcagtgaggatgatgccaggatgatgtctgcctcgcgcctggctgggactctgatgcccagccatggccttcctctcctgcgtgagaccagaaatctgggagccctgcgtggaggtgtgaaatccagacaattgaagatggggcatatcagagcctaagccacctctctaccttaatattgacaggaaaccccatccagagtttagccctgggagccttttctggactatcaagtttacagaagctggtggctgtggagacaaatctagcatctctagagaacttccccattggacatctcaaaactttgaaagaacttaatgtggctcacaatcttatccaatctttcaaattacctgagtatttttctaatctgaccaatctagagcacttggacctttccagcaacaagattcaaagtatttattgcacagacttgcggg

SEQ ID NO: 729 - DNA, 528 bp, Homo sapiens
atctttgggagctgcatttttgataaataagaaaaacctcctcattttaatgaagtagtttcaatggagcaaaaacatggaattaaagaaccacagttcaactccatcaatgaagtaacatcatttgccaactaacaaactgagtctacatctctttatttgcaatgtaaaaccccatcctgttaggggaaaaaaaaatagtactaatgttggatttagaagtccggagttcaattttaggctttggagagaagtaatccacttttacttgagatttccaatctcatatcaccaccatcatcattatcaccattatcatcaccaccaccaccaccatgagcaaccaacatcatcatcatcaagaacaacttgcttttgctagccaaagcaatgggaacacagcactctattagggggcaaggtattaatttgctttttatttaattataacaaaagcgaaatacatgtttttgtaatttcctatcaataatttagaagaattaaatataaatataaaataaaaaccaa

SEQ ID NO: 730 - DNA, 379 bp, Homo sapiens
  Unsure 221: n = a, g, c or t
  Unsure 233: n = a, g, c or t
gtcggcaggtctgaggcggcgctgtgtgtgtgaagcgtacctagggcgggaggcgacatggagacaggggcggccgagctgtatgaccaggcccttttgggcatcctgcagcacgtgggcaacgtccaggatttcctgcgcgttctctttggcttcctctaccgcaagacagacttctatcgcttgctgcgccacccatcggaccgcatgggcttycccgnccbkrggccggngaagccytgggksctgcaggtattcaaaacctttgaccacatgrccccgtcagratgatgagaagagaaggcaggaacttgaagagaaaatcagaagaaaggaagaggaagaggccaagactgtgtcagctgctgcagctgagaar

SEQ ID NO: 731 - DNA, 103 bp, Homo sapiens
aaagcaaccgcgtggtacgagtaacaactccaccggctggcgtccgckgcgcttggcsacaagtcacttttccagatctaggagcaccatggacacctcgtca

SEQ ID NO: 732 - DNA, 842 bp, Homo sapiens
actgtttaccaaacaccttggtcataataatgtcattagtttctccatttttattttctgaactgtacattcacaacttatgtttctttgagattaatagatattgggggaaaaacgcctttttaggaaaattatagtgaaaatttgacagttgattggcataatttcttgtttgaatgctgcctccattatataggtccttccaggaactcaaacactgtaagtgaaatatgggagtatagtttttattatttcttcttttccttttgttttcataatataatgcagtttgttcaggaaatcagcacaaagcctgatagtactttactaaaatgactgcattctttggattccttcagtctatggttcaagtcactaaagattcatttttgttgagtccttatgagaaacagcagtatgaatcttgacggtttctgcccgtcctaatggcagagctctctgacttgggtgtatgctgccaggctgggtactttcatactttgttttcttgttttgctttaaaactacgactcagcatacattttcccacatacatttttacattgtaccttaggactcagtcatctccacttaaattgatgacacaagcagctaataaccatttctgggtttctgcctaaccccctaattgtctgttaaagccaattctctgggtgtccagtgagtggtggctttttttctttccacattggcacattcacttctcccactcttggcatgtaagaaataagcatttacataattggaaaaatctggatttctgatgccaaagggttaaagcttcttggatttcatttcattgatatacagccactatttta

SEQ ID NO: 733 - DNA, 351 bp, Homo sapiens
  Unsure 333: n = a, g, c or t
  Unsure 345: n = a, g, c or t
agcaacggggtttcctgaaccttcgggccacccgaatccaccttctcagacggaaatagaatccagggattcttctacccatggaaaaacgtgcggaggaagcacatgtgggcgctggtctggacgtgcagcggcctcctcctcctgagctgcagcatctgcttgttctggtgggccaagcgccgggacgtgctgcatatgcccggtttcctggcgggtccgtgtgacatgtccaagtccgtctcgctgctctccaagcaccgagggaccaagaagacgccgtccacgggcagcgtgccagtcgccctgtccaaagagtccagggatgtgganggaggcaccganggggaa

SEQ ID NO: 734 - DNA, 200 bp, Homo sapiens
  Unsure 43: n = a, g, c or t
tttgcttgactgcttcctcctaaccctctasccactagcackntacttcctaaagctgttgtgtcattaactctgttggatcaactctctgggaaaagattctgttaatgtaagtgcacttactccctggatgttgtcactagtctagtggcttttgctaaataaacctttcttatttctagaaaaaaaaaaaaaaaaaa

SEQ ID NO: 735 - DNA, 160 bp, Homo sapiens
  Unsure 118: n = a, g, c or t
aaaaggacttgaattctgatcgggctgcagacgctctgcaccccgcccaagcttctatggtactttggtgtcctctctagcactggcaagtcgccttcctcttcgcccggcgccagdntcccctctctatgatcgccgagttcccggcgccgtctcgttk

SEQ ID NO: 736 - DNA, 369 bp, Homo sapiens
gcactggatgcacgcagccacatcagaaaggcggttaagaggggcgggggaagcgctctgatccacgatgtcctgcgagctgatcaatcagcttcacgctggaaataaccatataaaaacctgaactcaaagaagagaactggaataatcctccctaatcccacttcccatggtgagccccagctgggacgctgacacatggccccaactttttctcctgcctgatgtctggacccacaggggacagatggtggtccctggtcactgaagtacccacagaacccatgcaagaggcacaaaaccatctgcttagtggtcatgtggcagcagacagtatctcagaagtcctcgcagcatatgacttcactg

SEQ ID NO: 737 - DNA, 382 bp, Homo sapiens
aaacacacagatcgtccccaggctgctgttcgagaatgagtattcctatacgacccagatagactacaaccccaaggaccgcctgctctatgcctgggacaatggccaccaggtcacttaccatgtcatctttgcctactgacacccttgtccccacaagcagaagcacagaggggtcactagcaccttgtgtgtatgtgtgtgcgcgcacgtgtgtgtaggtgggaggcaggcaacaccaggagcagaaatgaaagaggcaagaaataagtgctatgtggcgagaaaaaaagttttaatgtattggagaagttttaaaaaacccagaaaaacgctttttttttttaataaagaagaaatttaaaatcaaaaaaaaaaaaar

SEQ ID NO: 738 - DNA, 406 bp, Homo sapiens
  Unsure 197: n = a, g, c or t
agttctagaggctgggaagtccgggattgaggggccagcatctaccaagggccttcttgttacttcatcccatgatggaaggtggaagggtaaagagaggagaagaagcagtaccgggaatcttacatcagtgacaacctggacctcgacatggaccagctggaaaaacggtcgcgggccagcgggagcagtgcggngcagcatgaaacacaagcgcctggtsccgkccatycaacsgcmakccacagcagttcccacacctcgggcattgaggcagacaccaagccccgggacacggggccggaagacagctactccagcagtgcsatscaccgcaagctgaaaacctgcagctcaatgaccagtcatggcagctcccacacctcaggggtggagartggcggca

SEQ ID NO: 739 - DNA, 502 bp, Homo sapiens
cactttgaaagaaaactgccattttgtatttaatagcctccaggttctttcagtaatgttatttgctctgtgtgtttttgtgtgtttgttgatgtgcgtttgtgcatatgcgtgagtttcattgccggggttggggcacaattgtggactggggccatgaggcttccctggtccccactgaacccaccttagttccacatttggctgcatcttgaattatgccgactccagacttctcctccttttttgcccttggctcttgacactctaaacccctggaccatctgaatggagcagccaagttcagtcccacatttctgtactgttcctctttcacagctggaatatgtcacatgatgaagttgtatagaaacagaaccatggatggatggccaggattgccgtggtccctagctagatccccttcctatcaatcacctgatagcaacagggacagctgccaataccctgctctttactcaatggtaccagggagggagca

SEQ ID NO: 740 - DNA, 367 bp, Homo sapiens
cagcaagcccaggcacttcgggctgtccccggcccccagagcccgggcaccgtggtcatcatcgccatcctgtctatcctcctggccgtcctcctcacggtcctcctggctgtgctcatatacacctgcttcaacagctgcaggagcacttccctatcaggcccagaggaggcagggagtgtgagaagatacaccacgcacctcgcgttcagcactcctgccgagggggcttcctgaggggttccagaggggcccacgtgtccctccacctcctccctggcccaggctgcagagcctgagctgggacacgccctgaagcttctggaccctgagagagattgtttcttttctttactatttttttttt

SEQ ID NO: 741 - DNA, 427 bp, Homo sapiens
aatgttcttgtgaatcttagacaacccccacaacatcattccctgctttatttgcttagtccattcttggtggattttatgagatgtcaacactcctcattaggattccctccttctgaagcctttgggattttctacccacccagcaaccaccagaggtgcagaaacccctgcagacatccttcttgcgcaasgcagttgtaccatgaatgcggtcgtcctgctgcagaccacgcccaccaagggcggggccacatccactgcagctgagctcagagccttctgtggggtctgcagtggcaaggccagccgccccctgtcttccctctggagctgtttgaggaatgcagttcttttgcataagaaaggcttttctctccagtcattctgcttgctgatcaagaacacttaacagcttcaggctttt

SEQ ID NO: 742 - DNA, 408 bp, Homo sapiens
tcatctatgtttatcacattttaataccacagcacttataatgatgtcactacatatagaagctcaaagttaagggatttgctgaagactgtaaagttaatggaagaattgagacaaaaatccagtgtagctggccacttatcccagggctttttctacttcatcacaaggaatgttttgaaagtgtctgctttttttatccttaaaattcacctgtcagggaggcattaaaaatttggaaatgtatgccagcaaaatgtgagctctgtattttttggcattcttatgtttgggtttaataagattaagaaaatgatactgggaattttctttttcctgaaactttgaatcaccctagtaagtcaaagtactaaaaaatgtactagatcattaagacttatgtgctct

SEQ ID NO: 743 - DNA, 449 bp, Homo sapiens
aacttgttatctattgcaggaaagtgcctgcaatatgccattgtgacaaggcaccatcaatcatcatgtccctttaccaggagggcccgtgtcataagccactatataaagggaatgatgggtggactgctttggacaaatggacctgcggtaggagagagggacaacagtaggagcaggcagatcttgctgtttcaaccaaaacctcatgctgaccagagttgaggaacagaagaagatggtgaaggcctgcagtcagcagaatatgtcaatgttttggttgaagaagctgcttgaatctgggcttttctgtgccatgtgttctcccagggccagcacaaagawgggcttttggtgcaggcccaagaccaccataatcatcattgattattcctctccacgccagktctctaaataaactttctcttctttctctgaaaaaaaaaaar

SEQ ID NO: 744 - DNA, 207 bp, Homo sapiens
atttccggttccggtgtcagttcgaggcgccgccgccgccgccgcagccgccggagccgcaatgcctaaaggaggaagaaagggaggccacaaaggccgggcgaggcagtatacaagccctgaggagatcgacgcgcastgcaggctgagaagcagaaggccagggaagaagaggagcaaaaaaaaaaaaaaaaagcttatggatac

SEQ ID NO: 745 - DNA, 208 bp, Homo sapiens
agaacatcctaatcrwaaaagttcgaggcgccgccgccgccgccgcagccgccggagccgcaatgcctaaaggaggaagaaagggaggccacaaaggccgggcgaggcagtatacaagccctgaggagatcgacgcgcastgcaggctgagaagcagaaggccagggaagaagaggagcaaaaaaaaaaaaaaaaagcttatggatac

SEQ ID NO: 746 - DNA, 442 bp, Homo sapiens
cgtcatttaggcttttgggatttgttggtatggaaaaatacatggattctcatggtactcggtggtttgagtagtctggcgttctctaggacactgtggggaggtaggacgcagttgtctgcccctgtgccccaaacattcagctcaggatggctgctgagctkggktttgggaaaactcacaaccctgtggatgtaacaggagtcagcagttttgatcactggttcatggaaacatgtgagaatatatatgaacatcttttgagtcttgctggtattgtcattcattctttcaatcactaattcattcatttatacattcagccccttgtttaaatatgtgcttcctgccggtcagcaggaagtcttaagaatggagcctggggtccaaatgagagccctcagtggctgttcaggggscaatccgttatgtacagtgggtc

SEQ ID NO: 747 - DNA, 487 bp, Homo sapiens
  Unsure 221: n = a, g, c or t
tctgtggaaaggcgaggtctggaaagcagcccctcccctgggagagagcscagggcaggcatgctgtcctgtttcccccactcsscaacagggctggcstccggctctgtcataccctatctactcctgccttcttccagctggcattccctggcagcgatggcggggaaactggcagacatgagcaggtgccatctgtatccaccacatactcctgctgntgtggtgtggcgaagacaaggctgcccagccccaacaccacgaggcaccctcgggcatgctgttgcttctgggaccagtgaccagcctgstgsscctgctggaccttaggaggccaaggcaggtgaattgcttgagtccaggagtttgagaccagcctgagcaacatggtgaaactccgtctctacaaaaaacaaaaaaaatccagcgtggaggcatgcacctgtggtttcagctactcaagaagtgaggcaggaggattgcttka

SEQ ID NO: 748 - DNA, 601 bp, Homo sapiens
aaaaagcgccattacgcagagagaaagttacgaggttcgtggccgcggtttccccaggcagctggcgctggaggcttcggcgtcacgtgctggtctggatttttctcgatgcactggggaaagcggtggactcttatcgtgggagggctcttgatctgtgatttatagataggcacagctactcccgttcgggaacccaacggcagacaggtcctagtgcccatcagatacccgcggccgggactcggagctgtggggtgtggggaggcggaggcaccaactaagagcgacctagcatcgcaaagccgccctcggggcctcatggcgggacgctcctgggaaaggctttagcgcggtgtctctctctctggccttggctctgtgactatcaggtcctcgcgctgtcgcggcatccaggcgttcagaaactcgttttcatcttcttggtttcatcttaataccaacgtcatgtctggttctaatggttccaaagaaaattctcacaataaggctcggacgtctccttacccaggttcaaaagttgaacgaagccaggttcctaatgagaaagtgggctggcttgttgagtggcagactataa

SEQ ID NO: 749 - DNA, 210 bp, Homo sapiens
aaaaattaaacctcaccgmcggattcaattctctcgttctcaggccgtcttcatcgccggagsgtttwcttacgaaaagaatgggcttctggacattgttaaaaggtctgctgctctttgcaaatgcactggcaatcctcaacgaagaccgtttccttgttccaagaggatggacactcggagaactccaccaaaccggtagaagaaast

SEQ ID NO: 750 - DNA, 380 bp, Homo sapiens
tgacataaaaggttaaagaacaggcaacacaatgagcacttaagtttttaacatgtggggaatagggcattttaaaggctggaaccagttcagaggaaacaagggtttgggtagaggtagaaaggtttaattaaccctggagatctgcaaatggagggaggggtgaaggaggaatcttaagacggagggagaagagccaaggacaaggtcaggttgaatkagtwagrggkgtgtacacahatcctcttgtgtgctaggtagtgggcgtgcatctggatctgagaggcagtaaagcagtgatgaagacagtgcagcagaacattgaagtcctgattgcagcagtgactctgcaaccttggataaattatttcaatctttat

SEQ ID NO: 751 - DNA, 245 bp, Homo sapiens
actcttctgaggatccggcaagatggcagaagtagagsagaagaagaagcggaccttccgcaagttcacctaccgcggcgtggacctcgaccagctggcarsatggtgggsgtctacaacggcaagaccttcaaccaggtggagatcaagcccgagatgatcggccastacctgggcgagttctscatcacctacaagyscgtaaagcatggscggsccggcatcggggccacccactcctcccg

SEQ ID NO: 752 - DNA, 369 bp, Homo sapiens
aagttagtacactgaaattcaaagtcatgctcataactgttaatgaaagcagattcaaagcaacaccaccaccactgaagtatttttagttatataagattggaactaccaagcatgtggctcctggtcagtgtaattctaatctcacggatatcctctgttgggggataaggactgtgtttctttccttttgtggaaaatkgtcattctgaatcttcaggvcaaacacatctggaaggtgatactgtacaaattatttgcaacacaggatacagacttcaaaacaatgagaacaacatttcatgtgtagaacggggctggtccactcctcccaaatgcargtccactatttctgcagaaaaatgttgg

SEQ ID NO: 753 - DNA, 491 bp, Homo sapiens
accaggtgcccagtcttccagttgcgagggcaagcaaacccgtcatgagcaactcccttccccatctctgctcaccatgtggacgctgaaatcgtccctggtcctgcttctgtgcctcacctgcagctatgcctttatgttctcttctctgagacagaaaactagcgaaccccaggggaaggtgcmrtryggagagcactttcggattcggcagaayctaccagagcacacccaaggctggcttgggagcaaatggctctggcttytktttgytgttgtgccgtttgtgatactgmagtgtcaaagagacagtgagaagaataaggagcagagtcctcctggccttcgaggcttcccatttcgcactccactaaagaaaaatcaaaatgcttctctttacaaagactgtgtattcaataccttaawsgaactygargtggagcttwtgaaatttgtgtccraagtgcrraatcttaaasgtgccatggcaa

SEQ ID NO: 754 - DNA, 336 bp, Homo sapiens
ataaatgctttccaatcagtgctcccattcttcattctattcaccacttagttactagaatgtttttctcaactatgaatctgacttcactcccattcttgaaaacctcctgtagttcctgttgtgtacgggataaagactgtgagcccctggagttcagggaccattacttaatcatattccagaacctatcacaatgaatgacacgaagaatatatttgataaaaatctgatgaatgaaccactctaaaatgcaactctaataaagaaaattactgcctawgtcrgddskgkmtcamsgktayaaaccgtdaaaattatgtatagtctgataaa

SEQ ID NO: 755 - DNA, 497 bp, Homo sapiens
ataaatgctttccaatcaatgctcccattcttcattctattcaccacttagttactagaatgtttttctcaactatgaatctgacttcactcccwttcttgaaaacctcctgtagttcctgttgtgtacgggataaagactgtgagcccctggagttcagggaccattwcttaatcatattccagaacctatcacaatgaatgacacgaagaatatatttgataaaaatctgatgaatgaaccactctaaaatgcaactctaataaagaaaattactgcctattcagttggaactgtaccaygttacaaacgtaaaattatgtatagtctgataaagaaatactrtaatagccttggaaacagctcacatacaattttttttataaatggattcattaccatataactggaccagcttactgaagagtagccctacagcagtcacttcgcagtttgcaattcatttgaggttcaaagctagctcaagggaaaacaac

SEQ ID NO: 756 - DNA, 400 bp, Homo sapiens
atcattttccctgcaggacacccggcctcggtcctgctttagtattcatcccagcttcattactgcagccacctcgcaacccaccctgggcagctgctaaaagggggaaaaattaaagcaattcatactcctggtgacttactgctgcagaataattggtttctgtttgcaaggaacattatcacagcaaagcccagaaaacagaaagggatgatcatggtgattttactgctgcttgtggctatcgtggttgttgcagtctggccgaccaactgatggcagtaaagagaccaccagcagtgacacctgccaatgacagatgcaagcccaacacccttttggtacgcaaaacctgctctcaataaattcccccaaagctccaaaaaaaaaaaaaaaaagg

SEQ ID NO: 757 - DNA, 524 bp, Homo sapiens
acttcctcgttgcccccgccgcgggccgagatggattccgggtgctggttgttcggcggcgagttcgaggactcggtgttcgaggagaggccggagcggcggtcaggaccgccgcgtcctactgcgccaagctctgcgagccgcagtggttttatgaagaaacagaaagcagtgatgatgttgaagtgctgactctcaagaaattcaaaggagacctggcctacagacgacaagagtatcagaaagcactgcaggagtattccagtatctctgaaaaattgtcatcaaccaattttgccatgaaaagggatgtccaggaaggtcaggctcggtgtctggctcacctgggtaggcatatggaggcgctggagattgctgcaaacttggaaaataaagcarccarcacagaccatttaaccacsgtactctacctccagcttgctatttgttcaagtttgcagaacttggagaaaacaattttctgcctgcagaaactgatttctttgcatccttttaatccttgg

SEQ ID NO: 758 - DNA, 543 bp, Homo sapiens
aagaagggaggtggtcgccctccgtcgtggtctggcgtgtattccgagcsttggtgtctggcggtttccgagcgttggtgtctggcggtttccgaccgttggtgtctggcggtttccgaccgttggtgtctggcacgcgccaccctctcttgctttggttgcgccatgccgatgtaccagacaagaagacaagaaaatgatttgaggacagcttcaatcgcggtgtgaagaagaaagcagcaaaacgaccactgaaaacaacgccggtggcaaaatatccaaagaaagggtcccaagcggtacatcgtcatagccggaaacagtcagagccaccagccaatgatmttttcaatgctgcgaaastgccaaaagtgacatgcagggatgtccttcctgagatccgtgctatctgcattgaggaaattgggtgttggatgcaaagctacagcacgtctttcctcaccgacagctatttaaaatatattggttggactctgcatgataagcaccgagaagtccgcgtgaagtgcgtgaaggctctga

SEQ ID NO: 759 - DNA, 850 bp, Homo sapiens
aagtttcatgggttcctggacgctcagccaggggtagtctctgaagggccgcctggcaattgggagcagaagccagtttcccgccatctgctctccgtggaggcagtgctctcgcggctgctgcccgttggggtccagctgaggaaggagcgcggatcccaggctcgttctttgcctgggctgcccctgcggcccctggggcgggtgctgctgcggcgccagctccaagggcgkatccaggcgggaggggcctcctcggagaagcggggcgcggtcccaactacgcagaggctggcacgccgaccctccacacctcaccacgcccccatctccgtccgtgtacacacactcacacaaggacgccaaccccacctagatgcaaagcaggattcaaaagaacatctttgcgttttctaccggctccccatcatcgtactagggaggaagaagcgggtgagaaacaaaacttctttccattgtcctgcccgtttctgcggacttgttctgaggccgaggcacctctaagatactgatggctctgcagaggacccattcattgcttctgcttttgctgctgaccctgctggggctggggctggtccagcctcctatggccaggatggcatgtaccagcgattcctgcggcaacacgtgcaccctgaggagacaggtggcagtgatcgctactgcaacttgatgatgcaaagacggaagatgactttgtatcactgcaagcgcttcaacaccttcatccatgaagatatctggaacattcgtagtatctgcagcaccaccaatatccaatgcaagaacggcaagatgaactgccatgagggtgtagtgaggtcac

SEQ ID NO: 760 - DNA, 532 bp, Homo sapiens
  Unsure 524: n = a, g, c or t
ataaaacaaaatagtatgcaacttacagcaatgtctctcccacttataataaaacacctaactctcatgtagcattttatccatattgagagctctgtgagatagaaattattatattacaagtcacagatatgtaaactgagatgcagagacatcaataacttgctcaaggttacaaggtggacttagtagttttaagcagaaccatgaaaacctctgtgacaactccctccagctccaagagtgccgggaggtggggggcggcgcatccgcggcctcgagcttgctacctcagcccatccccaccacccctgacatcgagaacgctgagctcacccccatcttgcccttcctgttccttggcaatgagcaggatgctcaggacctggacaccatgcagcggctgaacatcggctacgtcatcaacgtcaccactcatcttcccctctaccactatgagaaaggcctgttcaactacaagcggctgccagcactgacagcaacaagcagaacctgcggcagtntttgaaga

SEQ ID NO: 761 - DNA, 275 bp, Homo sapiens
tgtttgttttgcttctactaagactgttttgtttcaaaaaggaaacaagttttgtgtttgctgtctacgctggagtcctgaactgtgggtagaaaacacgacctggctttgtagaaaggacacagggctgttttatgaactaagcggtgaggctcaggtggcggctctcgcagacccctgatgctgttgttcttkgagggcttaaggcctgatgaacgtaggcacgtgatgcataatagtcttcaatggtacacttaactagtctcttctgtgta

SEQ ID NO: 762 - DNA, 546 bp, Homo sapiens
aggtatctaggtatcctcccatctcaggccagactggagattgagcgcctgttgtatacgggccctgggctaaccctccccccatcacacaactcaacagcaacgcccaagccacaacttctctggacctcaggttccctacctgcaaaacagtttgcacctcctccctccacaaaactgcaaccggggccggcgcggtggctcacgcctgtcatcttaacaccttgggaggcggaggtgggcggatcatcagaggtcaggagttcgagaccagcctggccaacaaggtgaaaccccatctgtactaaaaatacagaaatcagccgggcatggtggctcgcgcctgtagtcccagctacttgggaggctgaggtaggagaatcgcttgaatccgggaggtggaagtcgcagtgagccgagatcgcgccactgcactccagcctgggtgacacagtgagactccacctcaaaaacaaaacaaaacaaaaaactgcccgcagagagctgccccgaccacaaggcctgaatccagccttccagccccag

SEQ ID NO: 763 - DNA, 545 bp, Homo sapiens
ctggtgtctctcaaaagcctgatcctgccaaaaccaagaatcgccgcaaaaggaagccatccacttctgatgattctgactctaattttgagaaaattgtttcgaaagcagtcacaagcaagaaatccaagggggagagtgatgacttccatatggactttgactcagctgtggctcctcgggcaaaatctgtacgggcaaagaaacctataaagtacctggaagagtcagatgaagatgatctgttttaaaatgtgaggcgattattttaagtaattatcttaccaagcccaagactggttttaaagttacctgaagctcttaacttcctcccctctgaatttagtttggggaaggtgtttttagtacaagacatcaaagtgaagtaaagcccaagtgttctttagctttttataatactgtctaaatagtgaccatctcatgggcattgttttcttctctgctttgtctgtgttttgagtctgctttcttttgtctttaaacctgatttttaagttcttctgaactgtagaatagctatcttg

SEQ ID NO: 764 - DNA, 500 bp, Homo sapiens
gacctgggctgcagttaggttgtcgcctgcaggaggtgtgctgttgagggagaggaaaaccgtccgaggagaggatcaagtcttccataccagggaccaggccaaaaccagactgccactgcccctacttgggccccactgtccccagaaagcagctgctgtgatcatgggcaatatctttggaaaccttctcaagagcctgattgggaagaaggagatgcgcatcctgatggtgggcctggatgccgcagaaagaccaccatcctatacaagctgaaactgggggagatcgtcaccaccatccctaccattgggttcaatgtggagacagtggagtataagaacatcagctttacagtgtgggatgtgggtggccaggacaagattcgacccctctggagacactacttccagaacacccaagggttgatatttgtggtcgacagcaatgatcgggagcgagtaaatgaggcccgggaagagctgatgagaatgctggc

SEQ ID NO: 765 - DNA, 527 bp, Homo sapiens
gctttgacaaaaccagggaaagagacagagagagataatggcggctaaactaatctgttcgtctttaacagtgcattcaatggcaaataagaagccatcaccttctgctgcaacaagaacaataacctcaaagaagagcacagcgctccacaggtgaaactgctgacaagagtcgagcagctcaagcttctgaccaaagccgagaaagcaggacttttgtctttagcagagaaatcaggtttctctctatcgaccatcgagcgtcttggattgctgaccaaagcagaggagttcggcgttttgtctgccgccacaaacccggaaacgcctggaacgttattcactttgagcctcggtttactccttcttggaccggtttttgcatatgtggttcctgaagattacacttgggaagtagtgattcaggttcttgtggctctactctctgttcttggtggctctgctgcttttgctgcttctggttttgtctccaatttgcagaaatctgattagcccgatcgtttttt

SEQ ID NO: 766 - DNA, 921 bp, Homo sapiens
agtagggaggaaaaccggaggagagcgcaggaggaaacagtaccggctggaggccggtcttgcaggagcgggggactgctgggggcggggcttggtggtgaccgctggcggggcggggcctggggctcagaggggtgggctttggagatcagagggtcgacgctgcttcgttgcctggactctggtttccgccctggagcaagccggggcctggtcggcagctgggccgccatggagtccacgctgggcgcgggcatcgtgatagccgaggcgctacagaaccagctagcctggctggagaacgtgtggctctggatcacctttctgggcgatcccaagatcctctttctgttctacttccccgcggcctactacgcctcccgccgtgtgggcatcgcggtgctctggatcagcctcatcaccgagtggctcaacctcatcttcaagtggtttctttttggagacaggcccttttggtgggtccatgagtctggttactacagccaggctccagcccaggttcaccagttcccctcttcttgtgagactggtccaggcagcccttctggacactgcatgatcacaggagcagccctctggcccataatgacagccctgtcttcgcaggtggccactcgggcccgcagccgctgggtaagggtgatgcctagcctggcttattgcaccttccttttggcggttggcttgtcgcgaatcttcatcttagcacatttccctcaccaggtgctggctggcctaataactggcgctgtcctgggctggctgatgactccccgagtgcctatggagcgggagctaagcttctatgggttgactgcactggccctcatgctaggcaccagcctcatctattggaccctctttacactgggcctggatctttcttggtccatcagccta

SEQ ID NO: 767 - DNA, 570 bp, Homo sapiens
aagggaatctccgggcggggtagtgcaggcgccgggtttcccgcggtccgagctggcgcgggcggaggagaatcgctcttaaagggccagcgcacacgcgttcttttgttccggggccgcaggcggggcaggcccgactttcgccgtcttcttgtctactctccagaacggccatgatttcccaattcttcattctgtcctccaagggggaccgctcatctacaaagacttccgcggggacagtggcggccgggatgtggccgagctcttctaccggaagctgacgggactgccaggagacgagtccccggttgtcatgaggcagaggttgcagtgagccgagatccggacaccgcactccagcctgggagacagagcgagactccctctcgggcatcaccatggccgtcatttcattcacatcagacacagcggcctctatttggtggtcacaacttcagaaaacgtttctcccttcagcctcctagaactgctctccaggttggccacccttctgggcgattactgtggctccctgggcgaggggacatctcccgmaatgtggctctg

SEQ ID NO: 768 - DNA, 490 bp, Homo sapiens
cactcgctgcctcggcagcgctgctcttctaagatggctgccgctaccggtgcggtggcagcctcggccgcctcgggtcaggcggaaggtaaaaagatcaccgatctgcgggtcatcgatctgaagtccgagctgaatcggcggaacttagacatcaccggagtcaagaccgtgctcatctcccgactcaagcaggctattgaagaggaaggaggcgatccagataatattgaattaactgtttcaactgatactccaaacaagaaaccaactaaaggcaaaggtaaaaaacatgaagcagatgagttgagtggagatgcttctgtggaagatgatgcttttatcaaggactgtgaattggagaatcaagaggcacatgagcaagatggaaatgatgaactaaaggactctgaagaatttggtgaaaatgaagaagaaaatgtgcattccaaggagttactctctgcagaagaaaacaagagagctcatg

SEQ ID NO: 769 - DNA, 491 bp, Homo sapiens
cactcgctgcctcggcagcggctgctcttctaagatggctgccgctaccggtgcggtggcagcctcggccgcctcgggtcaggcggaaggtaaaaagatcaccgatctgcgggtcatcgatctgaagtccgagctgaatcggcggaacttagacatcaccggagtcaagaccgtgctcatctcccgactcaagcaggctattgaagaggaaggaggcgatccagataatattgaattaactgtttcaactgatactccaaacaagaaaccaactaaaggcaaaggtaaaaaacatgaagcagatgagttgagtggagatgcttctgtggaagatgatgcttttatcaaggactgtgaattggagaatcaagaggcacatgagcaagatggaaatgatgaactaaaggactctgaagaatttggtgaaaatgaagaagaaaatgtgcattccaaggagttactctctgcagaagaaaacaagagagctcatg

SEQ ID NO: 770 - DNA, 403 bp, Homo sapiens
cgcccacgcggaactcgaactcctgcagggcctcgtagtccagcgacctragggcgaacaggtggccgttgtctgtgttgatggagaccagggaggcgaggggcagaatcgcggtcttgaatgctgaaaagagctgcaacggtctcaggagaattttcgcggatggggcttgtgaatgaagccatggtcagttccggagcgttatcgttgatatctaccacctgtattatgacagtgcattttccagaaagacctgccccatcagaggctttaatatccacctgatatgacacaatttwwwmaaaatctagttttctgattattttaatttctccccttcgttcattaagtgcaaatgtcttagaaatctcttcatcaccataaaaaatgagtagaataaaaa

SEQ ID NO: 771 - DNA, 374 bp, Homo sapiens
attcttttcccccttctcaccggccaggatgcagacataatgatggcaggagctggagcagccacctgaggacccagagctcaaagccacatgttgagaagggcagagataactgtatccactctggactgctgacctttgaactattatgttatttccagggaaatgcaaaccaaaggatgtggtctctgatctaatccttagagaatgtgaccatgaagacacttttcctacctggtaaacaaaagataatgagaaaagtgaggttggaagttggtttactgagccaggagctataacaggtgctggagcaggggtcgtgatctgaatgaccagagggaaggactgatggaattggatggtgakagctccag

SEQ ID NO: 772 - DNA, 380 bp, Homo sapiens
agaaacagtctctccccagctcacttggctgaagatactaaagagaactagatgttatctagtgttatcctgctgatcccaatttcctatagttctggcaccagaaaatcctgaatgataggtttttctgaagctgctgacatcgggtcagccctcaacaccatcacctttggccatgttcaggaagtactcaaagatcatggctcaaaagtctgcagagcagagacaagagattgacaaagaggtgttgatgagggcaataaaagcaaaggtggctttatcacggtgagctacttctcacaggagtcgggatccacatctgcagactacacaaaaacaaacaacacagattaaaagcacaatcaccattgaaaaaaaar

SEQ ID NO: 773 - DNA, 472 bp, Homo sapiens
agatggctcaggtgcttcggctgccacggcagaggttctctgctctcttttctctgctggaactgggccctagagactggggcaggcggttctgactcagaagatcttttggaagaattgctgtgctgtttgatgcagttgatcactgatattccactcttagatattacatatgaaatatcagtagaagctatatcaacaatggttgttttcctttcctgccaactcttccacaaagaagttttgcgacagagcatcagccacaagtatttgatgcgaggtccatgtcttccatacaccagcaaacttgtgaagaccttattatataactttatcagacaagaaaagccacctcctccaggggcccatgttttccctcagcagtcggatgggggaggactgctttatggacttgcatcaggagtagcaacaggactctggactgtcttcacactaggtggtgtgggcagca

SEQ ID NO: 774 - DNA, 521 bp, Homo sapiens
attccaggcgcctgcaactaaacgtggccgggtctgcaagctaggtgccagcggggaaagtttccctgcttcttatcgtctgctttaacgccttaaatagcccgctgaaggctgcagcaggtgctaggtagcagcctcccggccctcgggaaaggcggggtggggaggcgagagcagcttagcctcctcgacctcccttcctggtgacggacgaacagttcccgtagaatttcgcttcaccgagtgaccttgagcccagggcgacggtcagcttgttaattcctggctgcaggaactttgtgagaattttaatgcatggaaaagctgtccatgttccaactgctgtacatccaaaagtctcagtgtaatagcaggaccaaaatattctgtcaatcagctgaccatatacttaatgactcctaaaatctcgtggacttctaagaaagcgccatggcctgtgctgctgttatgattcctgggttgttgcggtgctctgttggagccatccgtattgaggctgy

SEQ ID NO: 775 - DNA, 447 bp, Homo sapiens
acttagctgatagctagcattagctgctggccaggtgcataagccatcttagatgtccagcccaggttcatagaatgggatgcccactgatgacaatgccaggccctccagggaaacgaggtaagagaggccgaagaggagaatctggtcctcctggacagcctggtcctcagggccctcctggtccaaaaggcgataagggagaacaaggtgatcagggacctaggatgstgtttcctaaaatcaatcatgggtttctctctgctgatcagcagctcattaaacgccgcctgattaagggtgaccaaggacaggcagggcctccaggaccccctggccctccaggcccaagagggccacctggggacacagggaaagatggcccccgtggaatgccaggagtacccggtgaaccaggaaagccaggagaacaaggcttgatgggtc

SEQ ID NO: 776 - DNA, 491 bp, Homo sapiens
attctacaggaagcaattttttggttgtgaagggagaaatgggctcctcatggaggttcctgggctccactgaggaagagcccttcctcccagcagtgttgtataaagtagagaagataaatggatggagaacgcctgctccaagccggacgacgacattctagacatcccgctggacgatcccggcgccaacgcggccgccgccaaaatccaggcgagttttcggggccacatggcgcggaagaagataaagagcggagactaggccagaactgagcattttcaaagttcccgaggagagatggatgccgcgtccccttcgcagcgacgagacttccctgccgtgtttgtgaccccctcctgcccagcaacctgccagctacaggagccccctgcgtcccagagactccctcacccaggcaggctccgtcgcggagtcgctgagtccgtgcccttttagttagttctgcagtctagtatggtcccawttg

SEQ ID NO: 777 - DNA, 389 bp, Homo sapiens
tgtgtaatgttgaatctggaaattgatcagcattaaagggcacatgaagcagtgtctgcaggcgttcagtgctgcggasctgttaaaggtcactcagatgtgcaggtgttaatcttctctaaaagcctggtgatacagctctggctttctgagcacactacggatctggaaaatactggaaaatgtgatacttagaatactttggctgctaaggaaacttcctctccattgcagaatagctgagccaagtgagtgagtttgcagaaagcaggtggtgagctcctgcctgctggaggttgccatggagggccattcctgcccggcaacagcaccgtcctgcagggagccacttggcagaagggtgcagggctgctggtgtcagagcaaga

SEQ ID NO: 778 - DNA, 440 bp, Homo sapiens
tgtagtgtttgcagtagcgtttctcaccttccctgatgaagggtcttttcagttgcaaaccaacttgccacctcagcggcagaagttgagtgttgttcgtgtcaccacagagtctcgttctgtcacccagcctggtgtgcagtggttcargccattctcctgcctcagcctcccaagtagctgggattacaggcgcccaccaccaagcccagctaatttttgtatgttcggtagagacggggtttcaccatgttggccaggctggtctcaaactcctgacctcaagcgacccacccgcctcggcctcccagagttttgcgattacaggcgtgacaccacgcccagcggaatttcttattctttttgatctatcaaaacaacctcattgttctcaatgactgaccttataataagtaaatgttatagaacataaaaaaaaa

SEQ ID NO: 779 - DNA, 418 bp, Homo sapiens
atagattacaacggtgatggcgggcaagcggtccggctggagccgggcggctctcctccagctccttctcggcgtgaacctggtggtgatgccgcccacccgggcccggagtctgcgcttcgttaccttggaggggatgctacagcactgggaactgggccaggccctgcggcasgctatcacggcttcctaaacacctcttatcaccggcaagaggtttatgtgcgasrgacttgaccggactctcatgagtgctgaggccaacctggctggactcttccctcccaacggatgcagcgcttcaacccgaacatctcgtggcagcctattcctgtgcacactgtsccatcactgaggacaggctgctgaagttcccgttgggcccatgtccccgttatgagcagctgcagaacgagac

SEQ ID NO: 780 - DNA, 362 bp, Homo sapiens
aaacttgcccttctcaaacatggccgccacggcgcctctggaagggaaccgctctgggccccgcctttgatctcgttggtggggctgggggatgagagctgcaccgcgcgggacaagtcgccggcggcccgacggagcagaagagagagcatggagctggagaggatcgtcagtgcagccctccttgcctttgtccagacacacctcccggagccgacctcagtggcttggatgaggtcatcttctcctatgtgcttggggtcctggaggactgggcccctcggcattcagaggagaacttcgatatggaggctttcactgagatgatggaggcctatgtgcctggcttcgccacatcccca

SEQ ID NO: 781 - DNA, 379 bp, Homo sapiens
agattatttctacttggttgccttccagatgtttcacacttggacagcaaactgatttcaaaccactcyttttcaaagatctctgagggagacattgcacctggccactgcagcccagagcaggtctggccacggccatgagcatgctgagccatcatgcccaccgtggatgacattctggagcaggttggggagtctggctggttccagaagcaagccttcctcatcttatgcctgctgtcggctgcctttgcgcccatctgtgtgggcatcgtcttcctgggtttcacacctgaccaccactgccagagtcctggggtggctgagctgagccagcgctgtggctggagccctgcgaggagctgaactatacagtgcc

SEQ ID NO: 782 - DNA, 453 bp, Homo sapiens
ttctcatcttttgtaatgtgtggtcctcacttggcctctgggacacctccaagtcttagttgtcttcctaactcactagttgctccttctcactctcctttgctggttcttccttttctccttgacctcttaatgttagagtcccagagtgtagtcatagtccttctctgtgatctatttttaccctgtctttgtgatctagtataatggccaccacctataaacttatagctcacgaatttatatcactagctctgagatctctcacgaactccagatgtgcacatctgactgcttactcaacatctcgaatgcctgttcttcaagagtttgagtcatgaagtgtgaagcctagagatggtgtgatacacagagatgaaactggttttcacaggtgatagatggaaggctgttttcaaaagatcaagcttgaccacatattatcccctccac

SEQ ID NO: 783 - DNA, 553 bp, Homo sapiens
aactacttccgggggagcggcgcggcggcgsggagttggttctaaagagtggtgagtcagaagagacgtcaggcagcaagcgacttgggccatggctctgacctagacttctcacctccgcagtgcccgagcccactttcctggagaacctgctacggtacggactcttcctgggagccatcttccagctcatctgtgtgctggccatcatcgtacccattcccaagtcccacgaggcggaggctgaaccgtctgagcccagaagtgctgaggtgacgaggaagcccaaggctgctgttccttctgtgaacaagaggcccaagaaagagactaagaagaagcggtagaagaggaggcctgaggagctgggcgggcagggagagggtcttggggacagccctcctgggaatctacattgtgttcccccgcattccaggctcagggtctgaggaggctgtgacgccctatgaccgcagagatctagacagtcgtaacagtccccaggctcbagctgggcaatccaccacttcctcttccttctgcttctgtgacg

SEQ ID NO: 784 - DNA, 472 bp, Homo sapiens
  Unsure 445: n = a, g, c or t
ttccctttcgaattccagggtatatctgggaggccggagacgtgtctggttattacacagatgcacagctggacgtgggatccacacagctcagaacagttggatcttgctcagtctctgtcagaggaagatcccttggacaagaggacsctgccttggtgtgagagtgagggaagargaagctggaacgagggttaaggaaaaccttccagtctggacagtgactggagagctccaaggaaagcccctcggtaacccagccgctggcaccatgaacccagagagcagtatctttattgaggattaccttaagtatttccaggaccaagtgagcagagagaatctgctacaactgctgactgatgatgaagcctggaatggattcgtggctgctgctgaactgcccagggatgaggcagatgagctccgtaaagctctgaacaangcttgcaagtcacatggtcatgaagga

SEQ ID NO: 785 - protein, 157 aa, Homo sapiens
  SIGNAL -29..-1
  UNSURE 120: Xaa = Gln or His
MATMVPSVLWPRACWTLLVCCLLTPGVQGQEFLLRVEPQNPVLSAGGSLFVNCSTDCPSSEKIALETSLSKELVASGMGWAAFNLSNVTGNSRILCSVYCNGSQITGSSNITVYRLPERVELAPLPPWQPVGQNFTPALPSGGWVAPDXPHGGAASL

SEQ ID NO: 786 - protein, 151 aa, Homo sapiens
  SIGNAL -16..-1
MVMLLLLLSALAGLFGAAEGQAFHLGKCPNPPVQENFDVNKYLGRWYEIEKIPTTFENGRCIQANYSLMENGKIKVLNQELRADGTVNQIEGEATPVNLTEPAKLEVKFSWFMPSAPYWILATDYENYALVYSCTCIIQLFHVDFAWILAR

SEQ ID NO: 787 - protein, 143 aa, Homo sapiens
  SIGNAL -17..-1
MALEVLMLLAVLIWTGAENLHVKISCSLDWLMVSVIPVAESRNLYIFADELHLGMGCPANRIHTYVYEFIYLVRDCGIRTRVVSEETLLFQTELYFTPRNIDHDPQEIHLECSTSRKSVWLTPVSTENEIKLDPSPFIADFQT

SEQ ID NO: 788 - protein, 148 aa, Homo sapiens
  SIGNAL -17..-1
MALEVLMLLAVLIWTGAENLHVKISCSLDWLMVSVIPVAESRNLYIFADELHLGMGCPANRIHTYVYEFIYLVRDCGIRTRVVSEETLLFQTELYFTPRNIDHDPQEIHLECSTSRKSVWLTPVSTENEIKLDPSPFIADFQTTAEEL

SEQ ID NO: 789 - protein, 75 aa, Homo sapiens
  SIGNAL -24..-1
  UNSURE 51: Xaa = Glu or Lys
MLPPLPSRLGLLLLLLLCPAHVGGLWWAVGSPLVMDPTSICRKARRLAGRQAELCQAEPEVVAELARGARLGVRX

SEQ ID NO: 790 - protein, 64 aa, Homo sapiens
  SIGNAL -22..-1
MRGMKLLGALLALAALLQGAVSLKIAAFNIQTFGETKMSNATLVSYIVQILSRYDIALVQEVRD

SEQ ID NO: 791 - protein, 117 aa, Homo sapiens
  SIGNAL -33..-1
  UNSURE 82: Xaa = Glu or Gly
MSAQESCLSLIKYFLFVFNLFFFVLGSLIFCFGIWILIDKTSFVSFVGLAFVPLQIWSKVLAISGIFTMGIALLGCVGASRSSAASWACILGCCCSCLPHRSPWESSSPLSGPAXAK

SEQ ID NO: 792 - protein, 82 aa, Homo sapiens
  SIGNAL -32..-1
  UNSURE 35: Xaa = Gln or His
MAKMFDLRTKIMIGIGSSLLVAAMVLLSVVFCLYFKVAKALKAAKDPDAVAVKNHNPDKVCWATNSXAKATTMESCPSLQCC

SEQ ID NO: 793 - protein, 60 aa, Homo sapiens
  SIGNAL -19..-1
MKILVALAVFFLVSTQLFAEEIGANDDLNYWSDWYDSDQIKEELPEPFEHLLQRIARRPK

SEQ ID NO: 794 - protein, 79 aa, Homo sapiens
  SIGNAL -28..-1
MIYTMKKVHALWASVCLLLNLAPAPLNADSEEDEEHTIITDTELPPLKLMHSFCAFKADDGPCKAIMKRFSSIFSLDSA

SEQ ID NO: 795 - protein, 76 aa, Homo sapiens
  SIGNAL -24..-1
MGSACIKVTKYFLFLFNLIFFILGAVILGFGVWILADKSSFISVLQTSSSSLRMGAYVFIGVGAVTMLMGFLGCIG

SEQ ID NO: 796 - protein, 151 aa, Homo sapiens
  SIGNAL -18..-1
  UNSURE 117: Xaa = Ser or Thr
MKALIVLGLVLLSVTVQGKVFERCELARTLKRLGMDGYRGISLANWMCLAKWESGYNTRATNYNAGDRSTDYGIFQINSRYWCNDGKTPGAVNACHLSCSALLQDNIADAVACAKRVVRDPPTSASQSAGITGVXNCARPHSVLIKEITQT

SEQ ID NO: 797 - protein, 82 aa, Homo sapiens
  SIGNAL -29..-1
MDLQGRGVPSIDRLRVLLMLFHTMAQIMAEQEVENLSGLSTNPEKDIFVVRENGTTCLMAEFAAKFIVPYDVWASNYVDLIT

SEQ ID NO: 798 - protein, 60 aa, Homo sapiens
  SIGNAL -24..-1
MEEGGNLGGLIKMVHLLVLSGAWGMQMWVTFVSGFLLFRSLPRHTFGLVQSKLFPFYFHI

SEQ ID NO: 799 - protein, 142 aa, Homo sapiens
  SIGNAL -26..-1
  UNSURE 47: Xaa = Arg or Gly
MKTEQLNRFAGFGIGLASLFTENVLAHPCIVLRRQCQVNYHAQHYHLTPFTVINIMYSFNKTQGPRALWKGMXSTFIVQGVTLGAEGIISEFTPLPREVLHKWSPKQIGEHLLLKSLTYVVAMLFYSASLIETVQSEIIRDN

SEQ ID NO: 800 - protein, 126 aa, Homo sapiens
  SIGNAL -44..-1
MHEEEIYTSLQWDSPAPDTYQKCLSSNKCSGACCLVMVISCVFCMGLLTASIFLGVKLLQVSTIAMQQQEKLIQQERALLNFTEWKRSCALQMKYCQAFMQNSLSSAHNSSPCPNNWIQNRESCYY

SEQ ID NO: 801 - protein, 52 aa, Homo sapiens
  SIGNAL -20..-1
MGRAREVGWMAAGLMIGAGACYCVYKLTIGRDDSEKLEEEGEEEWDDDQELD

SEQ ID NO: 802 - protein, 154 aa, Homo sapiens
  SIGNAL -15..-1
MNILMLTFIICGLLTRVTKGSFEPQKCWKNNVGHCRRRCLDTERYILLCRNKLSCCISIISHEYTRRPAFPVIHLEDITLDYSDVDSFTGSPVSMLNDLITFDTTKFGETMTPETNTPETTMPPSEATTPETTMPPSETATSETMPPPSQTALT

SEQ ID NO: 803 - protein, 165 aa, Homo sapiens [sequence omitted]

SEQ ID NO: 804 - protein, 145 aa, Homo sapiens
  SIGNAL -22..-1
  UNSURE -1: Xaa = Ala or Ser
  UNSURE 21: Xaa = Asn, Cys, Ile, Phe, Ser, Thr, or Tyr
  UNSURE 46: Xaa = Cys, Phe, Ser, or Tyr
  UNSURE 84: Xaa = Ala, Pro, Ser, or Thr
MGRWSLTASPVTLTSLLPMVTXGPAAGKSSSSTSWDTVLTAIXCASTVQLISTTLGASASGARMPTTXCSGTTVFLTALQDTMQREELVKNATPPAEPARAEDLSXAPHVTPTSCCPTLAPAAPPASLGTILMTIMFASVGFSNE

SEQ ID NO: 805 - protein, 109 aa, Homo sapiens
  SIGNAL -30..-1
  UNSURE 42: Xaa = Arg or Lys
  UNSURE 58: Xaa = Leu or Val
  UNSURE 64: Xaa = Ile or Met
MAGKRSGWSRAALLQLLLGVNLVVMPPTRARSLRFVTLEGMLQHWELGQALRQRYHGFLNTSYHRQEVYVRXYFDRTLMSAEANLAGXFPPNGXQRFNPNISWQPIPVH

SEQ ID NO: 806 - protein, 57 aa, Homo sapiens
  SIGNAL -32..-1
MATPPFRLIRKMFSFKVSRWMGLACFRSLAASSPSIRQKKLMHKLQEENAFREEMKI

SEQ ID NO: 807 - protein, 79 aa, Homo sapiens
  SIGNAL -19..-1
MVGILPLCCSGCVPSLCCSSYVPSVAPTAAHSVRVPHSAGHCGQRVLACSLPQVFLKPWIFVEHFSSWLSLELFSFLRY

SEQ ID NO: 808 - protein, 147 aa, Homo sapiens
  SIGNAL -20..-1
MDSSTAHSPVFLVFPPEITASEYESTELSATTFSTQSPLQKLFARKMKILGTIQILFGIMTFSFGVIFLFTLLKPYPRFPFIFLSGYPFWGSVLFINSGAFLIAVKRKTTETLIILSRIMNFLSALGAIAGIILLTFGFHPRSKLHL

SEQ ID NO: 809 - protein, 96 aa, Homo sapiens
  SIGNAL -33..-1
MKLKLKNVFLAYFLVSIAGLLYALVQLGQPCDCLPPLRAAAEQLRQKDLRISQLQAELRRPPPAPAQPPEPEALPTIYVVTPTYARLVQKAELVRL

SEQ ID NO: 810 - protein, 169 aa, Homo sapiens
  SIGNAL -16..-1
MSGCGLFLRTTAAARACRGLVVSTANRRLLRTSPPVRAFAKELFLGKIKKKEVFPFPEVSQDELNEINQFLGPVEKFFTEEVDSRKIDQEGKIPDETLEKLKSLGLFGLQVPEEYGGLGFSNTMYSRLGEIISMDGSITVTLAAHQAIGSRGSSWLALRSRKPNNLPKL

SEQ ID NO: 811 - protein, 136 aa, Homo sapiens
  SIGNAL -36..-1
MEELQEPLRGELRLCFTQAARTSLLLLRLNDAALRALQECQRQQVRPVIAFQGHRGYLRLPGPGWSCLFSFIVSQCCQEGAGGSLDLVCQRFLRSGPNSLHCLGSLRERLIIWAAMDSIPAPSSVQGHNLTEDARH

SEQ ID NO: 812 - protein, 109 aa, Homo sapiens
  SIGNAL -23..-1
  UNSURE 81: Xaa = Pro or Ser
MCYGKCARCIGHSLVGLALLCIAANILLYFPNGETKYASENHLSRFVWFFSGIVGGGLLMLLPAFVFIGLEQDDCCGCCGHENCGKRCAMLSSVLAALIGIAGXGYCVI

SEQ ID NO: 813 - protein, 74 aa, Homo sapiens
  SIGNAL -17..-1
MWPNLLPLCQRIHCIIGRFRCNGFEDCPDGSDEENCTANPLLCSTARYHCKNGLCIDKSFICDGQNNCQDNSDE

SEQ ID NO: 814 - protein, 137 aa, Homo sapiens
  SIGNAL -47..-1
  UNSURE 87: Xaa = Arg or Pro
MTLQWHLYEMARNLKVQDMLRAEVLAARHQAQGDMATMLQLVPLLKASIKETLRLHPISVTLQRYLVNDLVLRDYMIPAKTLVQVAIYALGREPTFFFDPENFDPTRWLSKDKNITYFRNLGFGWGVRQCLGRXIAE

SEQ ID NO: 815 - protein, 98 aa, Homo sapiens
  SIGNAL -20..-1
MDKDSQGLLDSSLMASGTASRSEDEESLAGQKRASSQALGTIPKRRSSSRFIKRKKFDDELVESSLAKSSTRAKGASGVEQGAVRVVNPPPVRRRRYQ

SEQ ID NO: 816 - protein, 113 aa, Homo sapiens
  SIGNAL -36..-1
MMTEKHEDHCLKSCSGHSYIRKNWLGCIVFPFSALLQQSEISGTFQVTIPPVLLGYTWSNTYVFPKEDSNEQNLKECTFLNIFATIEPQISYVTCNPTLDKFLDQTEVLQRAQ

SEQ ID NO: 817 - protein, 136 aa, Homo sapiens
  SIGNAL -41..-1
  UNSURE 91: Xaa = Leu or Phe
MKAIKKSLTEEEYLYLDFSHQTEGCIFPLHTSVTLFLLSYCDCKIFKICLVVTKEVSRDSSLLRDDLIQDVEIQIISRQELPPIVQNCCLPAVVERSDNFCRAGLAVVLRHIIQKSYEADPLKKELLELLGXKRLA

SEQ ID NO: 818 - protein, 137 aa, Homo sapiens
  SIGNAL -16..-1
  UNSURE 57: Xaa = Asp or Gly
  UNSURE 58: Xaa = Cys or Ser
MENFSLLSISGPPISSSALSAFPDIMFSRATSLPDIAKTAVPTEASSPAQALPPQYQSIIVRQGIQNTVLSPXXSLGDTQHGEKLRRNCTIYRPWFSPYSYFVCADKESQLEAYDFPEVQQDEGKWDNCLSEDMAEN

SEQ ID NO: 819 - protein, 113 aa, Homo sapiens
  UNSURE 34: Xaa = Ala or Glu
MLGSRVDRPKLSVAPSVVLEEDQVLVSPAVDLEXGCRLRDFTEKIMNVKGKVILSMLVVSTVIIVFWEFINSTEGSFLWIYHSKNPEVDDSSAQKGWWFLSWFNNGIHNYQQG

SEQ ID NO: 820 - protein, 174 aa, Homo sapiens
MAAGLFGLSARRLLAAAATRGLPAARVRWESSFSRTVVAPSAVAGKRPPEPTTPWQEDPEPEDENLYEKNPDSHGYDKDPVLDVWNMRLVFFFGVSIILVLGSTFVAYLPDYRMKEWSRREAERLVKYREANGFPSWNPTASTPARSSCQRMSDQLLSGAQEAPPSPPPACHSD

SEQ ID NO: 821 - protein, 159 aa, Homo sapiens
MERYAAALEEVADGARQQERHYQLLSALQSLVKELPSSFQQRLSYTTLSDLALALLDGTVFEIVQGLLEIQHLTEKSLYNQRLRLQNEHRVLRQALRQKHQEAQQACRPHNLPVVQAAQQRELEAVEHRIREEQRAMDHKIILELDRKVADQQSTLEKA

SEQ ID NO: 822 - protein, 143 aa, Homo sapiens
MSGFENLNTDFYQTSYSIDDQSQQSYDYGGSGGPYSKQYAGYDYSQQGRFVPPDMMQPQQPYTGQIYQPTQAYTPASPQPFYGNNFEDEPPLLEELGINFDHIWQKTLTVLHPLKVADGSIMNETDLAGPMVFCLAFWSTLLL

SEQ ID NO: 823 - protein, 138 aa, Homo sapiens
MVKTKLKTVVIDITVIPFADDFFCPGAPAGVEISPAADGPSPEGPIAEPDGESDGEEEVEPPGANDGETVGEFETGDEDLGAIDPGGEVIGAEDGGIVEDDLGAIGAGGEVIGAEDGETGDVDLGGAGGEVVGETGEL

SEQ ID NO: 824 - protein, 74 aa, Homo sapiens
  UNSURE 26: Xaa = Asn, Ile, Lys, or Met
  UNSURE 27: Xaa = any one of the twenty amino acids
  UNSURE 28: Xaa = Asn, His, or Tyr
  UNSURE 53: Xaa = Ala, Asp, Glu, Leu, Phe, Ser, Tyr, Val, or *
MRSHTITMTTTSVSSWPYSSHRMRFXXXHSDQPPQNFSATPNVTTCPMDEKLXTTVLTTSYSVIFIVGLVGNII

SEQ ID NO: 825 - protein, 135 aa, Homo sapiens
  UNSURE 8: Xaa = Gln or Glu
  UNSURE 63: Xaa = Glu or Gly
  UNSURE 133: Xaa = His or Pro
MKEAGQMXNLESARAGRSVSTQTGSMTGQIPRLSKVNLFTLLSLWMELFPAEAQRQKSQKNEXGKHGPLGDNEERTRVSTDKRQVKRTGLVVVKNMKIVGLHCSSEDLHAGQIALIKHGSRLKNCDPYFSRKXVL

SEQ ID NO: 826 - protein, 61 aa, Homo sapiens
  UNSURE 44: Xaa = Gln, Glu, or *
MPGAAGRRCPDRSPPFGPDFGSSGVLMLLKPESTCPDPSLYDAXLCPVPEPKPCRGVASDP

SEQ ID NO: 827 - protein, 130 aa, Homo sapiens
MRSHTITMTTTSVSSWPYSSHRMRFITNHSDQPPQNFSATPNVTTCPMDEKLLSTVLTTSYSVIFIVGLVGNIIALYVFLGIHRKRNSIQIYLLNVAIADLLLIFCLPFRIMYHINQNKWTLGVILCKVV

SEQ ID NO: 828 - protein, 67 aa, Homo sapiens
MNFLSALGAIAGIILLTFGFILDQNYICGYSHQNSQCKAVTVLFLGILITLMTFSIIELFISLLSQF

SEQ ID NO: 829 - protein, 55 aa, Homo sapiens
  UNSURE 26: Xaa = Gln or His
MPKGGRKGGHKGRARQYTSPEEIDAXCRLRSRRPGKKRSKKGGDGAAGDPKKKKK

SEQ ID NO: 830 - protein, 55 aa, Homo sapiens; identical to SEQ ID NO: 829
  UNSURE 26: Xaa = Gln or His

SEQ ID NO: 831 - protein, 86 aa, Homo sapiens
  UNSURE 2: Xaa = Leu or Phe
  UNSURE 9: Xaa = Arg, Gly, or Trp
  UNSURE 67: Xaa = Arg, Lys, Met, or Thr
  UNSURE 72: Xaa = Arg, Gly, or Trp
  UNSURE 85: Xaa = Ser or Tyr
MXLVDWFYXVLSSLGLWQKEAKILFLGLDNAGKTTLLHMLKDERLVQHQPTQYPTSEELSIGRIKFXAFDLXGHQIARRVWKDYXA

SEQ ID NO: 832 - protein, 131 aa, Homo sapiens
  UNSURE 129: Xaa = Leu or Val
MSPLECSECFGDQLLHRTYTWQLTLHSRPNYTRKRDTRSESLEIPISVVLPQRGTAEPFPRLHNLYSTPRCAQQAALPRLSRRMASQHSYPLNRFSSVPLDPMERPMSQADLELDYNPPRVQLSDEMFXFQ

SEQ ID NO: 833 - protein, 99 aa, Homo sapiens
  UNSURE 26: Xaa = Asp or Glu
  UNSURE 27: Xaa = Leu or Val
  UNSURE 32: Xaa =  Leu, Lys, Met, or *
  UNSURE 70: Xaa = Gln or His
  UNSURE 78: Xaa = Gln or His
MATVMAATAAERAVLEEEFRWLLHDXXHAVLXQLQDILKEASLRFTLPGSGTEGPAKQENFILGSCGTDXVKGVLTLXGDALSQADVNLKMPRNNQLLH

SEQ ID NO: 834 - protein, 96 aa, Homo sapiens
MVSHTFHMRTEESDASQEGDDLPKSSANTSHPKQDDSPKSSEETIQPKEGDIPKAPEETIQSKKEDLPKSSEKAIQPKESNIPKSSAKPIQPKLAI

SEQ ID NO: 835 - protein, 97 aa, Homo sapiens
  UNSURE 94: Xaa = Leu or Met
MSLLDGLASSPRAPLQSSKARMKKLPKKSQNEKYRLKYLRLRKAAKATVFENAAICDEIARLEEKFLKAKEERRYLLKKLLQLQALTEGVSTGXQLL

SEQ ID NO: 836 - protein, 107 aa, Homo sapiens
MAQEVSEYLSQNPRVAAWVEALRCDGETDKHWRHRRDFLLRNAGDLAPAGGAASASTDEAADAESGTRNRQLQQLISFSMAWANHVFLGCRYPQKVMDKILSMAEGI

SEQ ID NO: 837 - protein, 65 aa, Homo sapiens
  UNSURE 20: Xaa = Arg or Pro
MRLLQPRSRLQRTSQKWLFXLHGDESLAPKHPGSRKNMDCYWQNTSVHCRRTSLWNLHLPGKTLG

SEQ ID NO: 838 - protein, 81 aa, Homo sapiens
  UNSURE 8: Xaa = Arg or Lys
  UNSURE 9: Xaa = Ala or Pro
  UNSURE 10: Xaa = Trp or *
  UNSURE 12: Xaa = Gly or Trp
  UNSURE 16: Xaa = Arg or Ser
MLARGLVXXXNXGNRXPVFTISFHHLPTWNLYISPSLSFLICETAANTGFQRVVKNPCEHLLQLPSTQNRLFHWRRRRDGR

SEQ ID NO: 839 - protein, 50 aa, Homo sapiens
  UNSURE 47: Xaa = Phe or Ser
MVRPRRAPYRSGAGGPLGGRGRPPRPLVVRAVRSRSWPASPPRPAAXADP

SEQ ID NO: 840 - protein, 85 aa, Homo sapiens
MPSFVDRIFGGELTSMIMYDQCRTVSLVHESFLDLSLPVLDDQSGKKSVNDKNLKKTVEDEDQDSEEEKDNDSYIKERSDIPSGT

SEQ ID NO: 841 - protein, 66 aa, Homo sapiens
  UNSURE 59: Xaa = Asn or Lys
MASIFSKLLTGRNASLLFATMGTSVLTTGYLLNRQKVCAEVREQPRLFPPSADYPDLRXTTTAWPS

SEQ ID NO: 842 - protein, 74 aa, Homo sapiens
MAAAAGLGLQREAAEGKWSAWRMTEETRIVYWIKDRQLTNRDSTILELQKVLKTCWFVCWSIFQLKFLFLFFFF

SEQ ID NO: 843 - protein, 68 aa, Homo sapiens
MKKNIWLLSGSRQQYLIALWRLLLLEIYISEGTHSTEEDINKQINDKERVAAAMENPNLREIVDSVSL

SEQ ID NO: 844 - protein, 53 aa, Homo sapiens
MFPPPAASLCSHVGCSRDHPPVGPGQTNRKGPITLTTAELTSTTVSVALAWTP

SEQ ID NO: 845 - protein, 73 aa, Homo sapiens
MCPGNWLWASMTFMARFSRSSSRSPVRTRGTLEEMPTVQHPFLNVFELERLLYTGKTACNHADEVWPGFYLGD

SEQ ID NO: 846 - protein, 143 aa, Homo sapiens
  UNSURE 109: Xaa = Arg or Lys
MTSGSKCPSTDSGKEEYIATFKGSEYFCYDLSQNPIQSSSDEITLSFKTLQRNGLMLHTGKSADYVNLALKNGAVSLVINLGSGAFEALVEPVNGKFNDNAWHDVKVTXNLRQVTISVDGILTTTGYTQEDYTMLGSDDFFYV

SEQ ID NO: 847 - protein, 112 aa, Homo sapiens [sequence omitted]

SEQ ID NO: 848 - protein, 54 aa, Homo sapiens
MIQRNLSNDDNSSPACMDADMDAVSHSYHWMSRNARCDPASLYSTLSSIFSTHS

SEQ ID NO: 849 - protein, 138 aa, Homo sapiens
MKKLKARMHQAIERFYDKMQNAESGRGQVMSSLAELEDDFKEGYLETVAAYYEEQHPELTPLLEKERDGLRCRGNRSPVPDVEDPATEEPGESFCDKVMRWFQAMLQRLQTWWHGVLAWVKEKVVALVHAVQALWKQF

SEQ ID NO: 850 - protein, 70 aa, Homo sapiens
MICTFLRAVQYTEKLHRSSAKRLLLPYIVLNKACLKTEPSLRCGLQYQKKTLRPRCILGVTQKTIWTQGP

SEQ ID NO: 851 - protein, 152 aa, Homo sapiens
MNVTPEVKSRGMKFAEEQLLKHGWTQGKGLGRKENGITQALRVTLKQDTHGVGHDPAKEFTNHWWNELFNKTAANLVVETGQDGVQIRSLSKETTRYNHPKPNLLYQKFVKMATLTSGGEKPNKDLESCSDDDNQGSSPQRFLLMRCCSKPV

SEQ ID NO: 852 - protein, 120 aa, Homo sapiens
MAKEEPQSISRDLQELQKKLSLLIDSFQNNSKVVAFMKSPVGQYLDSHPFLAFTLLVFIVMSAVPVGFFLLIVVLTTLAALLGVIILEGLVISVGGFSLLCILCGLSFVSLAMSGMMIAS

SEQ ID NO: 853 - protein, 103 aa, Homo sapiens
MDGTVLCKLINSLYPPGQEPIPKISESKMAFKQMEQISQFLKAAETYGVRTTDIFQTVDLWEGKDMAAVQRTLMALGSVAVTKDDGCYRGEPSWFHRKAQQNR

SEQ ID NO: 854 - protein, 78 aa, Homo sapiens
  UNSURE 68: Xaa = Arg or Gly
  UNSURE 76: Xaa = Asn or Lys
MPLPRKDNPQCSPLLPPLASVGKKMAKKIAAAPPPPPPPPSERRGKRAEQKGAVGQRPDWIFSPQPQXMFLMTQGXLV

SEQ ID NO: 855 - protein, 136 aa, Homo sapiens
MSEPGKLSQKIKVWLQEYWNITDLVAISTFMIGAILRLQNQPYMGYGRVIYCVDIIFWYIRVLDIFGVNKYLGPYVMMIGKMMIDMLYFVVIMLVVLMSFGVARQAILHPEEKPSWKLARNIFYMPYWMIYGEVLQ

SEQ ID NO: 856 - protein, 118 aa, Homo sapiens
MVRGWAPTWAIPELCGVWTLTGTPSMSSLAQLTTAVVSGTVKQSGEVLVNVKEHSRQINDIQLSRDMTMFVTASKDNTAKLFDSTTLEHQKTFRTERPVNSAALSPNYDHVVLGGGQE

SEQ ID NO: 857 - protein, 122 aa, Homo sapiens
MRPSCAPGWFYHKSNCYGYFRKLRNWSDAELECQSYGNGAHLASILSLKEASTIAEYISGYQRSQPIWIGLHDPQKRQQWQWIDGAMYLYRSWSGKSMGGNKHCAEMSSNNNFLTWSSNECN

SEQ ID NO: 858 - protein, 107 aa, Homo sapiens
  SIGNAL -23..-1
MLLQSGLSFRRLLLLSLVSGALGLGGAVLGVGLSLGPVPLTPWVFGVTAGVFLYVALVDMLPALLRPPEPLPTPHVLLQGLGLLLGGGLMLAITLLEERLLPVTTEG

SEQ ID NO: 859 - protein, 92 aa, Homo sapiens; identical to SEQ ID NO: 176
  SIGNAL -24..-1
  UNSURE 52: Xaa = Arg or Thr

SEQ ID NO: 860 - protein, 80 aa, Homo sapiens
  SIGNAL -32..-1
  UNSURE 44: Xaa = Ala or Pro
MMLVGFLGCCGAVQESQCMLGLFFGFLLVIFAIEIAAAIWGYSHKDEVIKEVQEFYKDTYNKLKTKDEPQRETLKXSTMR

SEQ ID NO: 861 - protein, 166 aa, Homo sapiens
  SIGNAL -15..-1
  UNSURE 142: Xaa = Ser or Thr
MLPLLIICLLPAIEGKNCLRCWPELSALIDYDLQILWVTPGPPTELSQNRDHLEEETAKFFTQVHQAIKTLRDDKTVLLEEIYTHKNLFTERLNKISDGLKEKDIQSTLKVTSCADCRTHFLSCNDPTFCPARNRRTSLWAVSLSSALLLAIAGDVXFTGKGRRRQ

SEQ ID NO: 862 - protein, 54 aa, Homo sapiens
  SIGNAL -26..-1
MVKVMWVSVLALAAAILLLTVPVAEGVTCSPMQLASCAAAMTSSSPPSEAVAQS

SEQ ID NO: 863 - protein, 55 aa, Homo sapiens
  SIGNAL -26..-1
MKPVSRRTLDWIYSVLLLAIVLISWGCIIYASMVSARRQLRKKYPDKIFGTNENL

SEQ ID NO: 864 - protein, 101 aa, Homo sapiens
  SIGNAL -22..-1
MRTLAILAAILLVALQARLSHSRQELMRLLQPRSRLQRTSQKWLFPLHGTKAWLQSIQAQGKTWPAIAEYQRALQENVAMEPASTREDSGHSAAELAEKEK

SEQ ID NO: 865 - protein, 57 aa, Homo sapiens
  SIGNAL -21..-1
MVLLSSTMSVLIFCLLNLAISDRRVMKSPTIIVIHLFFPHSSTSICIENLVTLLLGT

SEQ ID NO: 866 - protein, 129 aa, Homo sapiens
  SIGNAL -26..-1
MVSRMVSTMLSGLLFWLASGWTPAFAYSPRTPDRVSEADIQRLLHGVMEQLGIARPRVEYPAHQAMNLVGPQSIEGGAHEGLQHLGPFGNIPNIVAELTGDNIPKDFSEDQGYQTLQIPVLLEKQMMDV

SEQ ID NO: 867 - protein, 99 aa, Homo sapiens
  SIGNAL -41..-1
  UNSURE -36: Xaa = Ala, Cys, Gly, Ser, or Trp
MAAAVXAAPGALGSLHAGGARLVAACSAWLCPGLRLPGSLAGRRAGPAIWAQGWVPAAGGPAPKRGYSSEMKTEDELRVRHLEEENRDRDKNMVKGMEM

SEQ ID NO: 868 - protein, 108 aa, Homo sapiens
  SIGNAL -19..-1
MAAATGAVAASAASGQAEGKKITDLRVIDLKSELKRRNLDITGVKTVLISRLKQAIEEEGGDPDNIELTVSTDTPNKKPTKGKGKKHEADELSGDASVEDDAFIKVKC

SEQ ID NO: 869 - protein, 60 aa, Homo sapiens
  SIGNAL -41..-1
MPESLWQHSHWCGESFQLKEAGFLGTLEVFWMSFYLSRVNCTTKETSPLPKPARHLGLEP

SEQ ID NO: 870 - protein, 60 aa, Homo sapiens [sequence omitted]

SEQ ID NO: 871 - protein, 133 aa, Homo sapiens
  SIGNAL -13..-1
MAHCVTLVQLSISCDHLIDKDIGSKSDPLCVLLQDVGGGSWAELGRTERVRNCSSPEFSKTLQLEYRFETVQKLRFGIYDIDNKTPELRDDDFLGGAECSLGQIVSSQVLTLPLMLKPGKPAGRGTSRSQLRN

SEQ ID NO: 872 - protein, 68 aa, Homo sapiens; identical to SEQ ID NO: 238
  SIGNAL -47..-1

SEQ ID NO: 873 - protein, 67 aa, Homo sapiens
  SIGNAL -31..-1
MSRLGSAVPDCHINAPEPASWALGRWGSCRALDKGEGGREGDPKHPSLPGPRRQTCPMRSTLMNCWS

SEQ ID NO: 874 - protein, 81 aa, Homo sapiens [sequence omitted]

SEQ ID NO: 875 - protein, 53 aa, Homo sapiens [sequence omitted]

SEQ ID NO: 876 - protein, 56 aa, Homo sapiens [sequence omitted]

SEQ ID NO: 877 - protein, 53 aa, Homo sapiens
MKKPQSENFGGGPRTWIDLLVVFPKVHVLEIFSLSYYSLKKKMLTVYLFSSIL

SEQ ID NO: 878 - protein, 58 aa, Homo sapiens
MSTKRRLEEEQEPLRKQFLSEENMATHFSQLSLHNDQPLLQPHHDLLPSPAPTQEPLL

SEQ ID NO: 879 - protein, 61 aa, Homo sapiens
MASDLDFSPPECPSPLSWRTCYGTDSSWEPSSSSSVCWPSSYPFPSPTRRRLNRLSPEVLR

SEQ ID NO: 880 - protein, 61 aa, Homo sapiens
MLSLDFLDDVRRMNKRQLYYQVLNFGMIVSSALMIWKGLMVITGSESPIVVVSGKMGISSF

SEQ ID NO: 881 - protein, 113 aa, Homo sapiens
MIVSSALMIWKGLMVITGSESPIVVVLSGSMEPAFHRGDLLFLTNRVEDPIRVGEIVVFRIEGREIPIVHRVLKIHEKFVPYIGIVTILMNDYPKFKYAVLFLLGLFVLVHRE

SEQ ID NO: 882 - protein, 72 aa, Homo sapiens
  UNSURE 17: Xaa = Arg, Cys, Gly, Ser
  UNSURE 61: Xaa = Gln or His
MGSSRDTSRSLGGCSPXSSLNGFGFKDDHLRLLGCHSATDHLQLLATLGFLHFCLYVLLLXRLSHDIYLSVM

SEQ ID NO: 883 - protein, 70 aa, Homo sapiens
MWYAKKQGQKNKEAERQERAVVHMDERREEQIVQLLNSVQAKNDKESEAQISTPDLAVRSAPSGQPFRAC

SEQ ID NO: 884 - protein, 53 aa, Homo sapiens
MSGFENLNTDFYQTSYSIDDQSQQSYDYGGSGGPYNSMLAMTIRSKADLSLQT

SEQ ID NO: 885 - protein, 56 aa, Homo sapiens
MIFCSHKLALLSIFPEHTPGVCKYSLPLLHTHRVFTSVTFCAYCSAPCLFHLTVII

SEQ ID NO: 886 - protein, 103 aa, Homo sapiens
MMGSKMASASRVVQVVKPHTPLIRFPDRRDNPKPNVSEALRSAGLPSHSSVISQHSKGSKSPDLLMYQGPPDTAEIIKTLPQKYRRKLVSQEEMEFIQRGGPE

SEQ ID NO: 887 - protein, 124 aa, Homo sapiens
MARVIIDNKDGPTQKYLLIFGAFVSVYIQEMFRFAYYKLLKKASEGLKSINPGETAPSMRLLAYVSGLGFGIMSGVFSFVNTLSDSLGPGTVGIHGDSPQFFLLFSFHDAGHYLAACILGHCIF

SEQ ID NO: 888 - protein, 62 aa, Homo sapiens
MASSTVPVSAAGSANETPEIPDNVGDWLRGVYPLPLIGMTSGELDTKFGTLCCGSLAGQELE

SEQ ID NO: 889 - protein, 65 aa, Homo sapiens
MLRHSPSLWELVEEHVPLRERREVKRILGGGGGGPEPGAAGGGGDVTGTAPRGSILSSPQLPPHL

SEQ ID NO: 890 - protein, 140 aa, Homo sapiens
MGQNREMLPFWMNSTGRREGWQRGWHGYDNELMDMRGIFLAFGPDFKSNFRAAPIRSVDVYNVMCNVVGITPLPNNGSWSRVMCMLKGRAALPRLSGPATVPWHDSSLPACITDHIACLRKKHHQQSGPPKPDDFHFMCE

SEQ ID NO: 891 - protein, 62 aa, Homo sapiens
MEMASSAGSWLSGCLIPLVFLRLSVHVSGHAGDAGKFHVALLGGTAELLCPLSLWPGTYPRR

SEQ ID NO: 892 - protein, 114 aa, Homo sapiens
MDIVAHCEKAMAESVKKHQFSTSESYLPATLILNSISFNTDGSIQYKEKLYFSASEALDAYIDDFHLNYEPPDIDTKVNLDQSPLEFLAKSNSGVHGIAPGQSGMEKIIQWYAA

SEQ ID NO: 893 - protein, 55 aa, Homo sapiens
  UNSURE 27: Xaa = Asn or Thr
  UNSURE 34: Xaa = Asn or Lys
  UNSURE 37: Xaa = Asn or Lys
  UNSURE 39: Xaa = Leu or Val
MRCRPSSVHVAILTEAIPPKMISFSTXSKRIFKXSPXMXKSQVCPLIGEISGSWM

SEQ ID NO: 894 - protein, 123 aa, Homo sapiens
  UNSURE 26: Xaa = Gln or His
MPKGGRKGGHKGRARQYTSPEEIDAXCRLRSRRPGKKRSKKGGDGAAGDPKKEKKSLDSDESEDEEDDYQQKRKGVEGLIDIENPNRVAQTTKKVTQLDLDGPRSFRGENEKRLRSRRQKSVT

SEQ ID NO: 895 - protein, 123 aa, Homo sapiens; identical to SEQ ID NO: 894
  UNSURE 26: Xaa = Gln or His

SEQ ID NO: 896 - protein, 81 aa, Homo sapiens
  UNSURE 78: Xaa = Ser or Thr
MVGLKKKSADDVKKVFHMLDKDKSGFIEEDELGFILKGFSPDARDLSAKETKMLMAAGDKDGDGKIGVDEFSTLVAEXKKH

SEQ ID NO: 897 - protein, 143 aa, Homo sapiens
MYTTVDANGYLKNGSAGQLSQSSHLALQLPYNVLGLGRSANFLDHLYVGIPRPSGEKSIRKQEWTAIIPNSQLIVIPYPHNVPRSWSAKLYLTPSNIVLLTAIALIGVCVFILAIIGILHWQEKKADDREKRQEAHRFHFDAM

SEQ ID NO: 898 - protein, 68 aa, Homo sapiens
MMDTMDPFWFNAFKRTNTILHHLRMSKHTDAAEEVLLEKKGCTGVITLNRPKFLNALTLNMIRQIYHS

SEQ ID NO: 899 - protein, 74 aa, Homo sapiens; identical to SEQ ID NO: 297

SEQ ID NO: 900 - protein, 81 aa, Homo sapiens
  UNSURE 19: Xaa = Arg or Ser
  UNSURE 74: Xaa = Asn or Lys
  UNSURE 75: Xaa = Arg or Leu
MGATGPKLGACGLRLGGRXGGSEAAGAEQALVRPRGRAVPPFVFTRRGSMFYDEDGDLAHEFYEETIVTKNGQXXAKLRAS

SEQ ID NO: 901 - protein, 68 aa, Homo sapiens
MWAFPWEEPLYVITFYIVAVEAKWTESPRQHEVVLQVILEKLTYHTTHQPMQKPVYVQSAECLGPPKK

SEQ ID NO: 902 - protein, 107 aa, Homo sapiens
  UNSURE 19: Xaa = Glu or Gly
  UNSURE 23: Xaa = Arg or Ser
  UNSURE 27: Xaa = Tyr or *
  UNSURE 28: Xaa = Lys or Thr
  UNSURE 74: Xaa = Gly or Val
  UNSURE 100: Xaa = Trp or *
  UNSURE 102: Xaa = Gln or His
  UNSURE 104: Xaa = Gln or His
  UNSURE 107: Xaa = Gly or Val
MPQLKLTSVWTTTHSYYTXTRTXSPGXXPGPPPMDIQMANNFTPPSATPQGNDCDLYAHHSTASIVMPLHYSLXFIIGLVGNLLALVVIVQNRKKIISPXAXPXPIX

SEQ ID NO: 903 - protein, 72 aa, Homo sapiens
MLDSIWKPDLFFANEKGANFHEVTTDNKLLRIFKNGNVLYSIRLTLTLSCPMDLKNFPMDVQTCIMQLESLV

SEQ ID NO: 904 - protein, 57 aa, Homo sapiens
MGKQRNLTLFFSFPFCETVFLNHLLNSVFFPSYSFVEPLLSYLRFPQTHISLLFQLY

SEQ ID NO: 905 - protein, 102 aa, Homo sapiens
MERLTLPLGGAAAVDEYLEYRRIVGEDDGGKLFTPEEYEEYKRKVLPLRLQNRLFVSWRSPTGMDCKLVGPETLCFCTHRYKQHKTDLEAIPQQCPIDPPAK

SEQ ID NO: 906 - protein, 104 aa, Homo sapiens
  UNSURE 64: Xaa = Gln or His
MSTLLISSSDALLEELERSTLQDSDEYSNPAPLPLDQHSRKETNLDETSEILSIQDNTSPLPAXSCILPISRSSMSTVKPKSQRNHHRLLKRQQLLSWMSSLLT

SEQ ID NO: 907 - protein, 63 aa, Homo sapiens
  UNSURE 39: Xaa = Phe or Val
  UNSURE 56: Xaa = Pro or Ser
  UNSURE 57: Xaa = Ala or Pro
  UNSURE 60: Xaa = Gly or Val
MDYGYVQTTSTEMLRNFIQTEAVVSKPFSLFDLSSVGLXGAETQQSKVAPQQCSQXXRPXQSL

SEQ ID NO: 908 - protein, 65 aa, Homo sapiens
MLSALPGWGPAHLQRPLLGPASCLGILRPAMTAHSFALPVIIFTTFWGLVGIAGPWFVPKDPTAE

SEQ ID NO: 909 - protein, 83 aa, Homo sapiens
  UNSURE 42: Xaa = Asp or Glu
MLVERKVNGLVPRLMPVIAAHWEAQVGASLEGSSILDRAVIXHNLLSASKLYNNITFEELGALLEIPAAKAEKIASQMITEDV

SEQ ID NO: 910 - protein, 94 aa, Homo sapiens
MASNEVIADINCKGRSKSNLGWTPLHLACYFGHRQVVQDLLKAGAEVNVLNDMGDTPLHRAAFTGRKVKIILCSMFVSEVFGGVVTIVFSVITI

SEQ ID NO: 911 - protein, 75 aa, Homo sapiens
MPGPTPSGTNVGSSGRSPSKAVAARAGDPLSGRGKMPAVGQGVQAAQPRQAPGGCGDSTQKIHLGSKLALFQYWL

SEQ ID NO: 912 - protein, 160 aa, Homo sapiens
  UNSURE 97: Xaa = Cys or Trp
  UNSURE 107: Xaa = Trp or *
MRPLPPVGDVRLELSPPPPLLPVPVVSGSPVGSSGRLMASSSSLVPDRLRLPLCFLGVFVCYFYYGILQEKITRGKYGEGAKQETFTFALTLVFIQXVINAVFAKIXWDRTRSWLYAACSISYLGAMVSSNSALQFVNYPTQVLGKSCKPIPVMLLGVTS

SEQ ID NO: 913 - protein, 60 aa, Homo sapiens
MRLSPFHLQLEFHMKEKREDLQISWSFISVPEMAVNIQPKHWGRTRWLRQVRCLTFSRTS

SEQ ID NO: 914 - protein, 137 aa, Homo sapiens
MEYLIGIQGPDYVLVASDRVAASNIVQMKDDHDKMFKMSEKILLLCVGEAGDTVQFAEYIQKNVQLYKMRNGYELSPTAAANFTRRNLADCLRSRTPYHVNLLLAGYDEHEGPALYYMDYLAALAKALLQPTAMVPS

SEQ ID NO: 915 - protein, 55 aa, Homo sapiens
MADRGGVGEAAAVGASPASVPGLNPTLGWRERLRPGWRGLGPRCGSWRGWGCFTP

SEQ ID NO: 916 - protein, 132 aa, Homo sapiens
MISITEWQKIGVGITGFGIFFILFGTLLYFDSVLLAFGNLLFLTGLSLIIGLRKTFWFFFQRHKLKGTSFLLGGVVIVLLRWPLLGMFLETYGFFSLFKGFFPVAFGFLGNVCNIPFLGALFRRLQGTSSMV

SEQ ID NO: 917 - protein, 143 aa, Homo sapiens
MLQAPRGRARAALRRLAVATRTMAGAPTVSLPELRSLLASGRARLFDVRSREEAAAGTIPGALNIPVSELESALQMEPAAFQALYSAEKPKLEDEHLVFFCQMGKRGLQARSWPGVLDTLGLATTLEPIENGWRKRVRQEAAY

SEQ ID NO: 918 - protein, 56 aa, Homo sapiens
MKMSRNSSLGGATHCTGASWEAKHGPASGASPSSLGFRPLSPSLPALGLKEAPDSM

What is claimed is:

1. An isolated polynucleotide, said polynucleotide comprising a nucleic acid sequence encoding:
i) A polypeptide comprising the amino acid sequence shown as SEQ ID NO:305;
ii) a polypeptide comprising any one of the amino acid sequences shown as SEQ ID NOs:170-304, 306-338,456-560, 785-918; or
iii) a biologically active fragment of any of said polypeptides.

2. The polynucleotide of claim 1, wherein said polypeptide comprises a signal peptide.

3. The polynucleotide of claim 1, wherein said polypeptide is a mature protein.

4. The polynucleotide of claim 1, wherein said polynucleotide comprises any one of the nucleic acid sequences shown as SEQ ID NOs:1-169, 339-455, or 561-784.

5. The polynucleotide of claim 1, wherein said polynucleotide is operably linked to a promoter.

6. An expression vector comprising the polynucleotide of claim 5.

7. A host cell recombinant for the polynucleotide of claim 1.

8. A non-human transgenic animal comprising the host cell of claim 7.

9. A pharmaceutical composition comprising the polynucleotide of claim 1, and a pharmaceutically acceptable carrier.

10. A method of making a GENSET polypeptide, said method comprising
a) providing a population of host cells comprising the polynucleotide of claim 5; and
b) culturing said population of host cells under conditions conducive to the production of said polypeptide within said host cells.

11. The method of claim 10, further comprising purifying said polypeptide from said population of host cells.

12. An isolated polynucleotide, said polynucleotide comprising any one of the nucleic acid sequences shown as SEQ ID NOs:1-169, 339-455, or 561-784.

13. A biologically active polypeptide encoded by the polynucleotide of claim 12.

14. An isolated polypeptide or biologically active fragment thereof, said polypeptide comprising any one of the amino acid sequences shown as SEQ ID NOs:170-338, 456-560, or 785-918.

15. The polypeptide of claim 14, wherein said polypeptide comprises a signal peptide.

16. The polypeptide of claim 14, wherein said polypeptide is a mature protein.

17. An antibody that specifically binds to the polypeptide of claim 14.

18. A pharmaceutical composition comprising the polypeptide of claim 14, and a pharmaceutically acceptable carrier.

19. A method of making a GENSET polypeptide, said method comprising
a) providing a population of cells comprising a polynucleotide encoding the polypeptide of claim 14, operably linked to a promoter;
b) culturing said population of cells under conditions conducive to the production of said polypeptide within said cells; and
c) purifying said polypeptide from said population of cells.

20. A method of determining whether a GENSET gene is expressed within a mammal, said method comprising the steps of:
a) providing a biological sample from said mammal
b) contacting said biological sample with either of:
i) a polynucleotide that hybridizes under stringent conditions to the polynucleotide of claim 1; or
ii) a polypeptide that specifically binds to the polypeptide of claim 14; and
c) detecting the presence or absence of hybridization between said polynucleotide and an RNA species within said sample, or the presence or absence of binding of said polypeptide to a protein within said sample;
wherein a detection of said hybridization or of said binding indicates that said GENSET gene is expressed within said mammal.

21. The method of claim 21, wherein said polynucleotide is a primer, and wherein said hybridization is detected by detecting the presence of an amplification product comprising the sequence of said primer.

22. The method of claim 21, wherein said polypeptide is an antibody.

23. A method of determining whether a mammal has an elevated or reduced level of GENSET gene expression, said method comprising the steps of:
a) providing a biological sample from said mammal; and
b) comparing the amount of the polypeptide of claim 14, or of an RNA species encoding said polypeptide, within said biological sample with a level detected in or expected from a control sample;
wherein an increased amount of said polypeptide or said RNA species within said biological sample compared to said level detected in or expected from said control sample indicates that said mammal has an elevated level of said GENSET gene expression, and wherein a decreased amount of said polypeptide or said RNA species within said biological sample compared to said level detected in or expected from said control sample indicates that said mammal has a reduced level of said GENSET gene expression.

24. A method of identifying a candidate modulator of a GENSET polypeptide, said method comprising:
a) contacting the polypeptide of claim 14 with a test compound; and
b) determining whether said compound specifically binds to said polypeptide;
wherein a detection that said compound specifically binds to said polypeptide indicates that said compound is a candidate modulator of said GENSET polypeptide.

25. The method of claim 24, further comprising testing the biological activity of said GENSET polypeptide in the presence of said candidate modulator, wherein an alteration in the biological activity of said GENSET polypeptide in the presence of said compound in comparison to the activity in the absence of said compound indicates that the compound is a modulator of said GENSET polypeptide.

26. A method for the production of a pharmaceutical composition comprising
a) identifying a modulator of a GENSET polypeptide using the method of claim 24; and
b) combining said modulator with a pharmaceutically acceptable carrier.
